United States Patent Application Publication US 2026/0258376 A1, published September 3, 2026 (application 18/877,836).

The application's sequence listing, which the Patent Office published only in electronic form, follows.

SEQUENCE LISTING (2241 sequences)

SEQ ID NO: 1 - DNA, 4107 bp, Streptococcus pyogenes
  source 1..4107: mol_type = genomic DNA
atggataagaaatactcaataggcttagatatcggcacaaatagcgtcggatgggcggtgatcactgatgaatataaggttccgtctaaaaagttcaaggttctgggaaatacagaccgccacagtatcaaaaaaaatcttataggggctcttttatttgacagtggagagacagcggaagcgactcgtctcaaacggacagctcgtagaaggtatacacgtcggaagaatcgtatttgttatctacaggagattttttcaaatgagatggcgaaagtagatgatagtttctttcatcgacttgaagagtcttttttggtggaagaagacaagaagcatgaacgtcatcctatttttggaaatatagtagatgaagttgcttatcatgagaaatatccaactatctatcatctgcgaaaaaaattggtagattctactgataaagcggatttgcgcttaatctatttggccttagcgcatatgattaagtttcgtggtcattttttgattgagggagatttaaatcctgataatagtgatgtggacaaactatttatccagttggtacaaacctacaatcaattatttgaagaaaaccctattaacgcaagtggagtagatgctaaagcgattctttctgcacgattgagtaaatcaagacgattagaaaatctcattgctcagctccccggtgagaagaaaaatggcttatttgggaatctcattgctttgtcattgggtttgacccctaattttaaatcaaattttgatttggcagaagatgctaaattacagctttcaaaagatacttacgatgatgatttagataatttattggcgcaaattggagatcaatatgctgatttgtttttggcagctaagaatttatcagatgctattttactttcagatatcctaagagtaaatactgaaataactaaggctcccctatcagcttcaatgattaaacgctacgatgaacatcatcaagacttgactcttttaaaagctttagttcgacaacaacttccagaaaagtataaagaaatcttttttgatcaatcaaaaaacggatatgcaggttatattgatgggggagctagccaagaagaattttataaatttatcaaaccaattttagaaaaaatggatggtactgaggaattattggtgaaactaaatcgtgaagatttgctgcgcaagcaacggacctttgacaacggctctattccccatcaaattcacttgggtgagctgcatgctattttgagaagacaagaagacttttatccatttttaaaagacaatcgtgagaagattgaaaaaatcttgacttttcgaattccttattatgttggtccattggcgcgtggcaatagtcgttttgcatggatgactcggaagtctgaagaaacaattaccccatggaattttgaagaagttgtcgataaaggtgcttcagctcaatcatttattgaacgcatgacaaactttgataaaaatcttccaaatgaaaaagtactaccaaaacatagtttgctttatgagtattttacggtttataacgaattgacaaaggtcaaatatgttactgaaggaatgcgaaaaccagcatttctttcaggtgaacagaagaaagccattgttgatttactcttcaaaacaaatcgaaaagtaaccgttaagcaattaaaagaagattatttcaaaaaaatagaatgttttgatagtgttgaaatttcaggagttgaagatagatttaatgcttcattaggtacctaccatgatttgctaaaaattattaaagataaagattttttggataatgaagaaaatgaagatatcttagaggatattgttttaacattgaccttatttgaagatagggagatgattgaggaaagacttaaaacatatgctcacctctttgatgataaggtgatgaaacagcttaaacgtcgccgttatactggttggggacgtttgtctcgaaaattgattaatggtattagggataagcaatctggcaaaacaatattagattttttgaaatcagatggttttgccaatcgcaattttatgcagctgatccatgatgatagtttgacatttaaagaagacattcaaaaagcacaagtgtctggacaaggcgatagtttacatgaacatattgcaaatttagctggtagccctgctattaaaaaaggtattttacagactgtaaaagttgttgatgaattggtcaaagtaatggggcggcataagccagaaaatatcgttattgaaatggcacgtgaaaatcagacaactcaaaagggccagaaaaattcgcgagagcgtatgaaacgaatcgaagaaggtatcaaagaattaggaagtcagattcttaaagagcatcctgttgaaaatactcaattgcaaaatgaaaagctctatctctattatctccaaaatggaagagacatgtatgtggaccaagaattagatattaatcgtttaagtgattatgatgtcgatcacattgttccacaaagtttccttaaagacgattcaatagacaataaggtcttaacgcgttctgataaaaatcgtggtaaatcggataacgttccaagtgaagaagtagtcaaaaagatgaaaaactattggagacaacttctaaacgccaagttaatcactcaacgtaagtttgataatttaacgaaagctgaacgtggaggtttgagtgaacttgataaagctggttttatcaaacgccaattggttgaaactcgccaaatcactaagcatgtggcacaaattttggatagtcgcatgaatactaaatacgatgaaaatgataaacttattcgagaggttaaagtgattaccttaaaatctaaattagtttctgacttccgaaaagatttccaattctataaagtacgtgagattaacaattaccatcatgcccatgatgcgtatctaaatgccgtcgttggaactgctttgattaagaaatatccaaaacttgaatcggagtttgtctatggtgattataaagtttatgatgttcgtaaaatgattgctaagtctgagcaagaaataggcaaagcaaccgcaaaatatttcttttactctaatatcatgaacttcttcaaaacagaaattacacttgcaaatggagagattcgcaaacgccctctaatcgaaactaatggggaaactggagaaattgtctgggataaagggcgagattttgccacagtgcgcaaagtattgtccatgccccaagtcaatattgtcaagaaaacagaagtacagacaggcggattctccaaggagtcaattttaccaaaaagaaattcggacaagcttattgctcgtaaaaaagactgggatccaaaaaaatatggtggttttgatagtccaacggtagcttattcagtcctagtggttgctaaggtggaaaaagggaaatcgaagaagttaaaatccgttaaagagttactagggatcacaattatggaaagaagttcctttgaaaaaaatccgattgactttttagaagctaaaggatataaggaagttaaaaaagacttaatcattaaactacctaaatatagtctttttgagttagaaaacggtcgtaaacggatgctggctagtgccggagaattacaaaaaggaaatgagctggctctgccaagcaaatatgtgaattttttatatttagctagtcattatgaaaagttgaagggtagtccagaagataacgaacaaaaacaattgtttgtggagcagcataagcattatttagatgagattattgagcaaatcagtgaattttctaagcgtgttattttagcagatgccaatttagataaagttcttagtgcatataacaaacatagagacaaaccaatacgtgaacaagcagaaaatattattcatttatttacgttgacgaatcttggagctcccgctgcttttaaatattttgatacaacaattgatcgtaaacgatatacgtctacaaaagaagttttagatgccactcttatccatcaatccatcactggtctttatgaaacacgcattgatttgagtcagctaggaggtgactga

SEQ ID NO: 2 - protein, 1368 aa, Streptococcus pyogenes [sequence omitted]

SEQ ID NO: 3 - protein, 1053 aa, Synthetic construct
MKRNYILGLDIGITSVGYGIIDYETRDVIDAGVRLFKEANVENNEGRRSKRGARRLKRRRRHRIQRVKKLLFDYNLLTDHSELSGINPYEARVKGLSQKLSEEEFSAALLHLAKRRGVHNVNEVEEDTGNELSTKEQISRNSKALEEKYVAELQLERLKKDGEVRGSINRFKTSDYVKEAKQLLKVQKAYHQLDQSFIDTYIDLLETRRTYYEGPGEGSPFGWKDIKEWYEMLMGHCTYFPEELRSVKYAYNADLYNALNDLNNLVITRDENEKLEYYEKFQIIENVFKQKKKPTLKQIAKEILVNEEDIKGYRVTSTGKPEFTNLKVYHDIKDITARKEIIENAELLDQIAKILTIYQSSEDIQEELTNLNSELTQEEIEQISNLKGYTGTHNLSLKAINLILDELWHTNDNQIAIFNRLKLVPKKVDLSQQKEIPTTLVDDFILSPVVKRSFIQSIKVINAIIKKYGLPNDIIIELAREKNSKDAQKMINEMQKRNRQTNERIEEIIRTTGKENAKYLIEKIKLHDMQEGKCLYSLEAIPLEDLLNNPFNYEVDHIIPRSVSFDNSFNNKVLVKQEENSKKGNRTPFQYLSSSDSKISYETFKKHILNLAKGKGRISKTKKEYLLEERDINRFSVQKDFINRNLVDTRYATRGLMNLLRSYFRVNNLDVKVKSINGGFTSFLRRKWKFKKERNKGYKHHAEDALIIANADFIFKEWKKLDKAKKVMENQMFEEKQAESMPEIETEQEYKEIFITPHQIKHIKDFKDYKYSHRVDKKPNRELINDTLYSTRKDDKGNTLIVNNLNGLYDKDNDKLKKLINKSPEKLLMYHHDPQTYQKLKLIMEQYGDEKNPLYKYYEETGNYLTKYSKKDNGPVIKKIKYYGNKLNAHLDITDDYPNSRNKVVKLSLKPYRFDVYLDNGVYKFVTVKNLDVIKKENYYEVNSKCYEEAKKLKKISNQAEFIASFYNNDLIKINGELYRVIGVNNDLLNRIEVNMIDITYREYLENMNDKRPPRIIKTIASKTQSIKKYSTDILGNLYEVKSKKHPQIIKKG

SEQ ID NO: 4 - protein, 1300 aa, unidentified
  source 1..1300: note = F. novicida
MSIYQEFVNKYSLSKTLRFELIPQGKTLENIKARGLILDDEKRAKDYKKAKQIIDKYHQFFIEEILSSVCISEDLLQNYSDVYFKLKKSDDDNLQKDFKSAKDTIKKQISEYIKDSEKFKNLFNQNLIDAKKGQESDLILWLKQSKDNGIELFKANSDITDIDEALEIIKSFKGWTTYFKGFHENRKNVYSSNDIPTSIIYRIVDDNLPKFLENKAKYESLKDKAPEAINYEQIKKDLAEELTFDIDYKTSEVNQRVFSLDEVFEIANFNNYLNQSGITKFNTIIGGKFVNGENTKRKGINEYINLYSQQINDKTLKKYKMSVLFKQILSDTESKSFVIDKLEDDSDVVTTMQSFYEQIAAFKTVEEKSIKETLSLLFDDLKAQKLDLSKIYFKNDKSLTDLSQQVFDDYSVIGTAVLEYITQQIAPKNLDNPSKKEQELIAKKTEKAKYLSLETIKLALEEFNKHRDIDKQCRFEEILANFAAIPMIFDEIAQNKDNLAQISIKYQNQGKKDLLQASAEDDVKAIKDLLDQTNNLLHKLKIFHISQSEDKANILDKDEHFYLVFEECYFELANIVPLYNKIRNYITQKPYSDEKFKLNFENSTLANGWDKNKEPDNTAILFIKDDKYYLGVMNKKNNKIFDDKAIKENKGEGYKKIVYKLLPGANKMLPKVFFSAKSIKFYNPSEDILRIRNHSTHTKNGSPQKGYEKFEFNIEDCRKFIDFYKQSISKHPEWKDFGFRFSDTQRYNSIDEFYREVENQGYKLTFENISESYIDSVVNQGKLYLFQIYNKDFSAYSKGRPNLHTLYWKALFDERNLQDVVYKLNGEAELFYRKQSIPKKITHPAKEAIANKNKDNPKKESVFEYDLIKDKRFTEDKFFFHCPITINFKSSGANKFNDEINLLLKEKANDVHILSIDRGERHLAYYTLVDGKGNIIKQDTFNIIGNDRMKTNYHDKLAAIEKDRDSARKDWKKINNIKEMKEGYLSQVVHEIAKLVIEYNAIVVFEDLNFGFKRGRFKVEKQVYQKLEKMLIEKLNYLVFKDNEFDKTGGVLRAYQLTAPFETFKKMGKQTGIIYYVPAGFTSKICPVTGFVNQLYPKYESVSKSQEFFSKFDKICYNLDKGYFEFSFDYKNFGDKAAKGKWTIASFGSRLINFRNSDKNHNWDTREVYPTKELEKLLKDYSIEYGHGECIKAAICGESDKKFFAKLTSVLNTILQMRNSKTGTELDYLISPVADVNGNFFDSRQAPKNMPQDADANGAYHIGLKGLMLLGRIKNNQEGKKLNLVIKNEEYFEFVQNRNN

SEQ ID NO: 5 - protein, 986 aa, Synthetic construct
MEKRINKIRKKLSADNATKPVSRSGPMKTLLVRVMTDDLKKRLEKRRKKPEVMPQVISNNAANNLRMLLDDYTKMKEAILQVYWQEFKDDHVGLMCKFAQPASKKIDQNKLKPEMDEKGNLTTAGFACSQCGQPLFVYKLEQVSEKGKAYTNYFGRCNVAEHEKLILLAQLKPEKDSDEAVTYSLGKFGQRALDFYSIHVTKESTHPVKPLAQIAGNRYASGPVGKALSDACMGTIASFLSKYQDIIIEHQKVVKGNQKRLESLRELAGKENLEYPSVTLPPQPHTKEGVDAYNEVIARVRMWVNLNLWQKLKLSRDDAKPLLRLKGFPSFPVVERRENEVDWWNTINEVKKLIDAKRDMGRVFWSGVTAEKRNTILEGYNYLPNENDHKKREGSLENPKKPAKRQFGDLLLYLEKKYAGDWGKVFDEAWERIDKKIAGLTSHIEREEARNAEDAQSKAVLTDWLRAKASFVLERLKEMDEKEFYACEIQLQKWYGDLRGNPFAVEAENRVVDISGFSIGSDGHSIQYRNLLAWKYLENGKREFYLLMNYGKKGRIRFTDGTDIKKSGKWQGLLYGGGKAKVIDLTFDPDDEQLIILPLAFGTRQGREFIWNDLLSLETGLIKLANGRVIEKTIYNKKIGRDEPALFVALTFERREVVDPSNIKPVNLIGVDRGENIPAVIALTDPEGCPLPEFKDSSGGPTDILRIGEGYKEKQRAIQAAKEVEQRRAGGYSRKFASKSRNLADDMVRNSARDLFYHAVTHDAVLVFENLSRGFGRQGKRTFMTERQYTKMEDWLTAKLAYEGLTSKTYLSKTLAQYTSKTCSNCGFTITTADYDGMLVRLKKTSDGWATTLNNKELKAEGQITYYNRYKRQTVEKELSAELDRLSEESGNNDISKWTKGRRDEALFLLKKRFSHRPVQEQFVCLDCGHEVHADEQAALNIARSWLFLNSNSTEFKSYKSGKQPFVGAWQAFYKRRLKEVWKPNA

SEQ ID NO: 6 - protein, 1125 aa, Synthetic construct
MRKKLFKGYILHNKRLVYTGKAAIRSIKYPLVAPNKTALNNLSEKIIYDYEHLFGPLNVASYARNSNRYSLVDFWIDSLRAGVIWQSKSTSLIDLISKLEGSKSPSEKIFEQIDFELKNKLDKEQFKDIILLNTGIRSSSNVRSLRGRFLKCFKEEFRDTEEVIACVDKWSKDLIVEGKSILVSKQFLYWEEEFGIKIFPHFKDNHDLPKLTFFVEPSLEFSPHLPLANCLERLKKFDISRESLLGLDNNFSAFSNYFNELFNLLSRGEIKKIVTAVLAVSKSWENEPELEKRLHFLSEKAKLLGYPKLTSSWADYRMIIGGKIKSWHSNYTEQLIKVREDLKKHQIALDKLQEDLKKVVDSSLREQIEAQREALLPLLDTMLKEKDFSDDLELYRFILSDFKSLLNGSYQRYIQTEEERKEDRDVTKKYKDLYSNLRNIPRFFGESKKEQFNKFINKSLPTIDVGLKILEDIRNALETVSVRKPPSITEEYVTKQLEKLSRKYKINAFNSNRFKQITEQVLRKYNNGELPKISEVFYRYPRESHVAIRILPVKISNPRKDISYLLDKYQISPDWKNSNPGEVVDLIEIYKLTLGWLLSCNKDFSMDFSSYDLKLFPEAASLIKNFGSCLSGYYLSKMIFNCITSEIKGMITLYTRDKFVVRYVTQMIGSNQKFPLLCLVGEKQTKNFSRNWGVLIEEKGDLGEEKNQEKCLIFKDKTDFAKAKEVEIFKNNIWRIRTSKYQIQFLNRLFKKTKEWDLMNLVLSEPSLVLEEEWGVSWDKDKLLPLLKKEKSCEERLYYSLPLNLVPATDYKEQSAEIEQRNTYLGLDVGEFGVAYAVVRIVRDRIELLSWGFLKDPALRKIRERVQDMKKKQVMAVFSSSSTAVARVREMAIHSLRNQIHSIALAYKAKIIYEISISNFETGGNRMAKIYRSIKVSDVYRESGADTLVSEMIWGKKNKQMGNHISSYATSYTCCNCARTPFELVIDNDKEYEKGGDEFIFNVGDEKKVRGFLQKSLLGKTIKGKEVLKSIKEYARPPIREVLLEGEDVEQLLKRRGNSYIYRCPFCGYKTDADIQAALNIACRGYISDNAKDAVKEGERKLDYILEVRKLWEKNGAVLRSAKFL

SEQ ID NO: 7 - protein, 707 aa, Synthetic construct
MADTPTLFTQFLRHHLPGQRFRKDILKQAGRILANKGEDATIAFLRGKSEESPPDFQPPVKCPIIACSRPLTEWPIYQASVAIQGYVYGQSLAEFEASDPGCSKDGLLGWFDKTGVCTDYFSVQGLNLIFQNARKRYIGVQTKVTNRNEKRHKKLKRINAKRIAEGLPELTSDEPESALDETGHLIDPPGLNTNIYCYQQVSPKPLALSEVNQLPTAYAGYSTSGDDPIQPMVTKDRLSISKGQPGYIPEHQRALLSQKKHRRMRGYGLKARALLVIVRIQDDWAVIDLRSLLRNAYWRRIVQTKEPSTITKLLKLVTGDPVLDATRMVATFTYKPGIVQVRSAKCLKNKQGSKLFSERYLNETVSVTSIDLGSNNLVAVATYRLVNGNTPELLQRFTLPSHLVKDFERYKQAHDTLEDSIQKTAVASLPQGQQTEIRMWSMYGFREAQERVCQELGLADGSIPWNVMTATSTILTDLFLARGGDPKKCMFTSEPKKKKNSKQVLYKIRDRAWAKMYRTLLSKETREAWNKALWGLKRGSPDYARLSKRKEELARRCVNYTISTAEKRAQCGRTIVALEDLNIGFFHGRGKQEPGWVGLFTRKKENRWLMQALHKAFLELAHHRGYHVIEVNPAYTSQTCPVCRHCDPDNRDQHNREAFHCIGCGFRGNADLDVATHNIAMVAITGESLKRARGSVASKTPQPLAAE

SEQ ID NO: 8 - protein, 426 aa, Synthetic construct
MIKVYRYEIVKPLDLDWKEFGTILRQLQQETRFALNKATQLAWEWMGFSSDYKDNHGEYPKSKDILGYTNVHGYAYHTIKTKAYRLNSGNLSQTIKRATDRFKAYQKEILRGDMSIPSYKRDIPLDLIKENISVNRMNHGDYIASLSLLSNPAKQEMNVKRKISVIIIVRGAGKTIMDRILSGEYQVSASQIIHDDRKNKWYLNISYDFEPQTRVLDLNKIMGIDLGVAVAVYMAFQHTPARYKLEGGEIENFRRQVESRRISMLRQGKYAGGARGGHGRDKRIKPIEQLRDKIANFRDTTNHRYSRYIVDMAIKEGCGTIQMEDLTNIRDIGSRFLQNWTYYDLQQKIIYKAEEAGIKVIKIDPQYTSQRCSECGNIDSGNRIGQAIFKCRACGYEANADYNAARNIAIPNIDKIIAESIKSGGS

SEQ ID NO: 9 - protein, 509 aa, Synthetic construct
NAMIAQKTIKIKLNPTKEQIIKLNSIIEEYIKVSNFTAKKIAEIQESFTDSGLTQGTCSECGKEKTYRKYHLLKKDNKLFCITCYKRKYSQFTLQKVEFQNKTGLRNVAKLPKTYYTNAIRFASDTFSGFDEIIKKKQNRLNSIQNRLNFWKELLYNPSNRNEIKIKVVKYAPKTDTREHPHYYSEAEIKGRIKRLEKQLKKFKMPKYPEFTSETISLQRELYSWKNPDELKISSITDKNESMNYYGKEYLKRYIDLINSQTPQILLEKENNSFYLCFPITKNIEMPKIDDTFEPVGIDWGITRNIAVVSILDSKTKKPKFVKFYSAGYILGKRKHYKSLRKHFGQKKRQDKINKLGTKEDRFIDSNIHKLAFLIVKEIRNHSNKPIILMENITDNREEAEKSMRQNILLHSVKSRLQNYIAYKALWNNIPTNLVKPEHTSQICNRCGHQDRENRPKGSKLFKCVKCNYMSNADFNASINIARKFYIGEYEPFYKDNEKMKSGVNSISM

SEQ ID NO: 10 - protein, 501 aa, Synthetic construct
MEVQKTVMKTLSLRILRPLYSQEIEKEIKEEEKERRKQAGGTGELDGGFYKKLEKKHSEMFSFDRLNLLLNQLQREIAKVYNHAISELYIATIAQGNKSNKHYISSIVYNRAYGYFYNAYIALGICSKVEANFRSNELLTQQSALPTAKSDNFPIVLHKQKGAEGEDGGFRISTEGSDLIFEIPIPFYEYNGENRKEPYKWVKKGGQKPVLKLILSTFRRQRNKGWAKDEGTDAEIRKVTEGKYQVSQIEINRGKKLGEHQKWFANFSIEQPIYERKPNRSIVGGLDVGIRSPLVCAINNSFSRYSVDSNDVFKFSKQVFAFRRRLLSKNSLKRKHGHAAHKLEPITEMTEKNDKFRKKIIERWAKEVTNFFVKNQVGIVQIEDLSTMKDREDHFFNQYLRGFWPYYQMQTLIENKLKEYGIEVKRVQAKYTSQLCSNPNCRYWNNYFNFEYRKVNKFPKFKCEKCNLEISADYNAARNLSTPDIEKFVAKATKGINLPEK

SEQ ID NO: 11 - protein, 582 aa, Synthetic construct
MKVLEFKIHPTEEQVSKIDQSLAACKLLWNLSIALKEESKQRYYRKKHKFDEFSPEIWGLSYSGHYDEKEFKTLKDKEKKLLIGNPCCKIAYFKKTSNGKEYTPLNSIPIRRFMNAENIDKDAVNYLNRKKLAFYFRENTAKFIGEIETEFKKGFFKSVIKPAYDAAKKGIRGIPRFKGRRDKVETLVNGQPETIKIKSNGVIVSSKIGLLKIRGLDRLQGKAPRMAKITRKATGYYLQLTIETDDTIYKESDKCVGLDMGAVAIFTDDLGRQSEAKRYAKIQKKRLNRLQRQASRQKDNSNNQRKTYAKLARVHEKIARQRKGRNAQLAHKITSEYQSVILEDLNLKNMTAAAKPKEREDGDGYKQNGKKRKSGLNKALLDNAIGQLRTFIENKANERGRKIIRVNPKHTSQTCPNCGNIDKANRVSQSKFKCVSCGYEAHADQNAAANILIRGLRDEFLRAIGSLYKFPVSMIGKYPGLAGEFTPDLDANQESIGDAPIENAEHSISKQMKQEGNRTPTQPENGSQSLIFLSAPPQPCGDSHGTNNPKALPNKASKRSSKKPRGAIPENPDQLTIWDLLD

SEQ ID NO: 12 - protein, 1368 aa, Synthetic construct
MDKKYSIGLAIGTNSVGWAVITDEYKVPSKKFKVLGNTDRHSIKKNLIGALLFDSGETAEATRLKRTARRRYTRRKNRICYLQEIFSNEMAKVDDSFFHRLEESFLVEEDKKHERHPIFGNIVDEVAYHEKYPTIYHLRKKLVDSTDKADLRLIYLALAHMIKFRGHFLIEGDLNPDNSDVDKLFIQLVQTYNQLFEENPINASGVDAKAILSARLSKSRRLENLIAQLPGEKKNGLFGNLIALSLGLTPNFKSNFDLAEDAKLQLSKDTYDDDLDNLLAQIGDQYADLFLAAKNLSDAILLSDILRVNTEITKAPLSASMIKRYDEHHQDLTLLKALVRQQLPEKYKEIFFDQSKNGYAGYIDGGASQEEFYKFIKPILEKMDGTEELLVKLNREDLLRKQRTFDNGSIPHQIHLGELHAILRRQEDFYPFLKDNREKIEKILTFRIPYYVGPLARGNSRFAWMTRKSEETITPWNFEEVVDKGASAQSFIERMTNFDKNLPNEKVLPKHSLLYEYFTVYNELTKVKYVTEGMRKPAFLSGEQKKAIVDLLFKTNRKVTVKQLKEDYFKKIECFDSVEISGVEDRFNASLGTYHDLLKIIKDKDFLDNEENEDILEDIVLTLTLFEDREMIEERLKTYAHLFDDKVMKQLKRRRYTGWGRLSRKLINGIRDKQSGKTILDFLKSDGFANRNFMQLIHDDSLTFKEDIQKAQVSGQGDSLHEHIANLAGSPAIKKGILQTVKVVDELVKVMGRHKPENIVIEMARENQTTQKGQKNSRERMKRIEEGIKELGSQILKEHPVENTQLQNEKLYLYYLQNGRDMYVDQELDINRLSDYDVDAIVPQSFLKDDSIDNKVLTRSDKNRGKSDNVPSEEVVKKMKNYWRQLLNAKLITQRKFDNLTKAERGGLSELDKAGFIKRQLVETRQITKHVAQILDSRMNTKYDENDKLIREVKVITLKSKLVSDFRKDFQFYKVREINNYHHAHDAYLNAVVGTALIKKYPKLESEFVYGDYKVYDVRKMIAKSEQEIGKATAKYFFYSNIMNFFKTEITLANGEIRKRPLIETNGETGEIVWDKGRDFATVRKVLSMPQVNIVKKTEVQTGGFSKESILPKRNSDKLIARKKDWDPKKYGGFDSPTVAYSVLVVAKVEKGKSKKLKSVKELLGITIMERSSFEKNPIDFLEAKGYKEVKKDLIIKLPKYSLFELENGRKRMLASAGELQKGNELALPSKYVNFLYLASHYEKLKGSPEDNEQKQLFVEQHKHYLDEIIEQISEFSKRVILADANLDKVLSAYNKHRDKPIREQAENIIHLFTLTNLGAPAAFKYFDTTIDRKRYTSTKEVLDATLIHQSITGLYETRIDLSQLGGD

SEQ ID NO: 13 - protein, 1053 aa, Synthetic construct
MKRNYILGLAIGITSVGYGIIDYETRDVIDAGVRLFKEANVENNEGRRSKRGARRLKRRRRHRIQRVKKLLFDYNLLTDHSELSGINPYEARVKGLSQKLSEEEFSAALLHLAKRRGVHNVNEVEEDTGNELSTKEQISRNSKALEEKYVAELQLERLKKDGEVRGSINRFKTSDYVKEAKQLLKVQKAYHQLDQSFIDTYIDLLETRRTYYEGPGEGSPFGWKDIKEWYEMLMGHCTYFPEELRSVKYAYNADLYNALNDLNNLVITRDENEKLEYYEKFQIIENVFKQKKKPTLKQIAKEILVNEEDIKGYRVTSTGKPEFTNLKVYHDIKDITARKEIIENAELLDQIAKILTIYQSSEDIQEELTNLNSELTQEEIEQISNLKGYTGTHNLSLKAINLILDELWHTNDNQIAIFNRLKLVPKKVDLSQQKEIPTTLVDDFILSPVVKRSFIQSIKVINAIIKKYGLPNDIIIELAREKNSKDAQKMINEMQKRNRQTNERIEEIIRTTGKENAKYLIEKIKLHDMQEGKCLYSLEAIPLEDLLNNPFNYEVDHIIPRSVSFDNSFNNKVLVKQEEASKKGNRTPFQYLSSSDSKISYETFKKHILNLAKGKGRISKTKKEYLLEERDINRFSVQKDFINRNLVDTRYATRGLMNLLRSYFRVNNLDVKVKSINGGFTSFLRRKWKFKKERNKGYKHHAEDALIIANADFIFKEWKKLDKAKKVMENQMFEEKQAESMPEIETEQEYKEIFITPHQIKHIKDFKDYKYSHRVDKKPNRELINDTLYSTRKDDKGNTLIVNNLNGLYDKDNDKLKKLINKSPEKLLMYHHDPQTYQKLKLIMEQYGDEKNPLYKYYEETGNYLTKYSKKDNGPVIKKIKYYGNKLNAHLDITDDYPNSRNKVVKLSLKPYRFDVYLDNGVYKFVTVKNLDVIKKENYYEVNSKCYEEAKKLKKISNQAEFIASFYNNDLIKINGELYRVIGVNNDLLNRIEVNMIDITYREYLENMNDKRPPRIIKTIASKTQSIKKYSTDILGNLYEVKSKKHPQIIKKG

SEQ ID NO: 14 - protein, 1300 aa, Synthetic construct
MSIYQEFVNKYSLSKTLRFELIPQGKTLENIKARGLILDDEKRAKDYKKAKQIIDKYHQFFIEEILSSVCISEDLLQNYSDVYFKLKKSDDDNLQKDFKSAKDTIKKQISEYIKDSEKFKNLFNQNLIDAKKGQESDLILWLKQSKDNGIELFKANSDITDIDEALEIIKSFKGWTTYFKGFHENRKNVYSSNDIPTSIIYRIVDDNLPKFLENKAKYESLKDKAPEAINYEQIKKDLAEELTFDIDYKTSEVNQRVFSLDEVFEIANFNNYLNQSGITKFNTIIGGKFVNGENTKRKGINEYINLYSQQINDKTLKKYKMSVLFKQILSDTESKSFVIDKLEDDSDVVTTMQSFYEQIAAFKTVEEKSIKETLSLLFDDLKAQKLDLSKIYFKNDKSLTDLSQQVFDDYSVIGTAVLEYITQQIAPKNLDNPSKKEQELIAKKTEKAKYLSLETIKLALEEFNKHRDIDKQCRFEEILANFAAIPMIFDEIAQNKDNLAQISIKYQNQGKKDLLQASAEDDVKAIKDLLDQTNNLLHKLKIFHISQSEDKANILDKDEHFYLVFEECYFELANIVPLYNKIRNYITQKPYSDEKFKLNFENSTLANGWDKNKEPDNTAILFIKDDKYYLGVMNKKNNKIFDDKAIKENKGEGYKKIVYKLLPGANKMLPKVFFSAKSIKFYNPSEDILRIRNHSTHTKNGSPQKGYEKFEFNIEDCRKFIDFYKQSISKHPEWKDFGFRFSDTQRYNSIDEFYREVENQGYKLTFENISESYIDSVVNQGKLYLFQIYNKDFSAYSKGRPNLHTLYWKALFDERNLQDVVYKLNGEAELFYRKQSIPKKITHPAKEAIANKNKDNPKKESVFEYDLIKDKRFTEDKFFFHCPITINFKSSGANKFNDEINLLLKEKANDVHILSIARGERHLAYYTLVDGKGNIIKQDTFNIIGNDRMKTNYHDKLAAIEKDRDSARKDWKKINNIKEMKEGYLSQVVHEIAKLVIEYNAIVVFEDLNFGFKRGRFKVEKQVYQKLEKMLIEKLNYLVFKDNEFDKTGGVLRAYQLTAPFETFKKMGKQTGIIYYVPAGFTSKICPVTGFVNQLYPKYESVSKSQEFFSKFDKICYNLDKGYFEFSFDYKNFGDKAAKGKWTIASFGSRLINFRNSDKNHNWDTREVYPTKELEKLLKDYSIEYGHGECIKAAICGESDKKFFAKLTSVLNTILQMRNSKTGTELDYLISPVADVNGNFFDSRQAPKNMPQDADANGAYHIGLKGLMLLGRIKNNQEGKKLNLVIKNEEYFEFVQNRNN

SEQ ID NO: 15 - protein, 1082 aa, Synthetic construct
MAAFKPNSINYILGLAIGIASVGWAMVEIDEEENPIRLIDLGVRVFERAEVPKTGDSLAMARRLARSVRRLTRRRAHRLLRTRRLLKREGVLQAANFDENGLIKSLPNTPWQLRAAALDRKLTPLEWSAVLLHLIKHRGYLSQRKNEGETADKELGALLKGVAGNAHALQTGDFRTPAELALNKFEKESGHIRNQRSDYSHTFSRKDLQAELILLFEKQKEFGNPHVSGGLKEGIETLLMTQRPALSGDAVQKMLGHCTFEPAEPKAAKNTYTAERFIWLTKLNNLRILEQGSERPLTDTERATLMDEPYRKSKLTYAQARKLLGLEDTAFFKGLRYGKDNAEASTLMEMKAYHAISRALEKEGLKDKKSPLNLSPELQDEIGTAFSLFKTDEDITGRLKDRIQPEILEALLKHISFDKFVQISLKALRRIVPLMEQGKRYDEACAEIYGDHYGKKNTEEKIYLPPIPADEIRNPVVLRALSQARKVINGVVRRYGSPARIHIETAREVGKSFKDRKEIEKRQEENRKDREKAAAKFREYFPNFVGEPKSKDILKLRLYEQQHGKCLYSGKEINLGRLNEKGYVEIDAALPFSRTWDDSFNNKVLVLGSENQNKGNQTPYEYFNGKDNSREWQEFKARVETSRFPRSKKQRILLQKFDEDGFKERNLNDTRYVNRFLCQFVADRMRLTGKGKKRVFASNGQITNLLRGFWGLRKVRAENDRHHALDAVVVACSTVAMQQKITRFVRYKEMNAFDGKTIDKETGEVLHQKTHFPQPWEFFAQEVMIRVFGKPDGKPEFEEADTLEKLRTLLAEKLSSRPEAVHEYVTPLFVSRAPNRKMSGQGHMETVKSAKRLDEGVSVLRVPLTQLKLKDLEKMVNREREPKLYEALKARLEAHKDDPAKAFAEPFYKYDKAGNRTQQVKAVRVEQVQKTGVWVRNHNGIADNATMVRVDVFEKGDKYYLVPIYSWQVAKGILPDRAVVQGKDEEDWQLIDDSFNFKFSLHPNDLVEVITKKARMFGYFASCHRGTGNINIRIHDLDHKIGKNGILEGIGVKTALSFQKYQIDELGKEIRPCRLKKRPPVR

SEQ ID NO: 16 - protein, 984 aa, Synthetic construct
MARILAFAIGISSIGWAFSENDELKDCGVRIFTKVENPKTGESLALPRRLARSARKRLARRKARLNHLKHLIANEFKLNYEDYQSFDESLAKAYKGSLISPYELRFRALNELLSKQDFARVILHIAKRRGYDDIKNSDDKEKGAILKAIKQNEEKLANYQSVGEYLYKEYFQKFKENSKEFTNVRNKKESYERCIAQSFLKDELKLIFKKQREFGFSFSKKFEEEVLSVAFYKRALKDFSHLVGNCSFFTDEKRAPKNSPLAFMFVALTRIINLLNNLKNTEGILYTKDDLNALLNEVLKNGTLTYKQTKKLLGLSDDYEFKGEKGTYFIEFKKYKEFIKALGEHNLSQDDLNEIAKDITLIKDEIKLKKALAKYDLNQNQIDSLSKLEFKDHLNISFKALKLVTPLMLEGKKYDEACNELNLKVAINEDKKDFLPAFNETYYKDEVTNPVVLRAIKEYRKVLNALLKKYGKVHKINIELAREVGKNHSQRAKIEKEQNENYKAKKDAELECEKLGLKINSKNILKLRLFKEQKEFCAYSGEKIKISDLQDEKMLEIDAIYPYSRSFDDSYMNKVLVFTKQNQEKLNQTPFEAFGNDSAKWQKIEVLAKNLPTKKQKRILDKNYKDKEQKNFKDRNLNDTRYIARLVLNYTKDYLDFLPLSDDENTKLNDTQKGSKVHVEAKSGMLTSALRHTWGFSAKDRNNHLHHAIDAVIIAYANNSIVKAFSDFKKEQESNSAELYAKKISELDYKNKRKFFEPFSGFRQKVLDKIDEIFVSKPERKKPSGALHEETFRKEEEFYQSYGGKEGVLKALELGKIRKVNGKIVKNGDMFRVDIFKHKKTNKFYAVPIYTMDFALKVLPNKAVARSKKGEIKDWILMDENYEFCFSLYKDSLILIQTKDMQEPEFVYYNAFTSSTVSLIVSKHDNKFETLSKNQKILFKNANEKEVIAKSIGIQNLKVFEKYIVSALGEVTKAEFRQREDFKK

SEQ ID NO: 17 - protein, 1122 aa, Synthetic construct
MGSDLVLGLAIGIGSVGVGILNKVTGEIIHKNSRIFPAAQAENNLVRRTNRQGRRLARRKKHRRVRLNRLFEESGLITDFTKISINLNPYQLRVKGLTDELSNEELFIALKNMVKHRGISYLDDASDDGNSSVGDYAQIVKENSKQLETKTPGQIQLERYQTYGQLRGDFTVEKDGKKHRLINVFPTSAYRSEALRILQTQQEFNPQITDEFINRYLEILTGKRKYYHGPGNEKSRTDYGRYRTSGETLDNIFGILIGKCTFYPDEFRAAKASYTAQEFNLLNDLNNLTVPTETKKLSKEQKNQIINYVKNEKAMGPAKLFKYIAKLLSCDVADIKGYRIDKSGKAEIHTFEAYRKMKTLETLDIEQMDRETLDKLAYVLTLNTEREGIQEALEHEFADGSFSQKQVDELVQFRKANSSIFGKGWHNFSVKLMMELIPELYETSEEQMTILTRLGKQKTTSSSNKTKYIDEKLLTEEIYNPVVAKSVRQAIKIVNAAIKEYGDFDNIVIEMARETNEDDEKKAIQKIQKANKDEKDAAMLKAANQYNGKAELPHSVFHGHKQLATKIRLWHQQGERCLYTGKTISIHDLINNSNQFEVDAILPLSITFDDSLANKVLVYATANQEKGQRTPYQALDSMDDAWSFRELKAFVRESKTLSNKKKEYLLTEEDISKFDVRKKFIERNLVDTRYASRVVLNALQEHFRAHKIDTKVSVVRGQFTSQLRRHWGIEKTRDTYHHHAVDALIIAASSQLNLWKKQKNTLVSYSEDQLLDIETGELISDDEYKESVFKAPYQHFVDTLKSKEFEDSILFSYQVDSKFNRKISDATIYATRQAKVGKDKADETYVLGKIKDIYTQDGYDAFMKIYKKDKSKFLMYRHDPQTFEKVIEPILENYPNKQINEKGKEVPCNPFLKYKEEHGYIRKYSKKGNGPEIKSLKYYDSKLGNHIDITPKDSNNKVVLQSVSPWRADVYFNKTTGKYEILGLKYADLQFEKGTGTYKISQEKYNDIKKKEGVDSDSEFKFTLYKNDLLLVKDTETKEQQLFRFLSRTMPKQKHYVELKPYDKQKFEGGEALIKVLGNVANSGQCKKGLGKSNISIYKVRTDVLGNQHIIKNEGDKPKLDF

SEQ ID NO: 18 - protein, 1388 aa, Synthetic construct
MTKPYSIGLAIGTNSVGWAVITDNYKVPSKKMKVLGNTSKKYIKKNLLGVLLFDSGITAEGRRLKRTARRRYTRRRNRILYLQEIFSTEMATLDDAFFQRLDDSFLVPDDKRDSKYPIFGNLVEEKVYHDEFPTIYHLRKYLADSTKKADLRLVYLALAHMIKYRGHFLIEGEFNSKNNDIQKNFQDFLDTYNAIFESDLSLENSKQLEEIVKDKISKLEKKDRILKLFPGEKNSGIFSEFLKLIVGNQADFRKCFNLDEKASLHFSKESYDEDLETLLGYIGDDYSDVFLKAKKLYDAILLSGFLTVTDNETEAPLSSAMIKRYNEHKEDLALLKEYIRNISLKTYNEVFKDDTKNGYAGYIDGKTNQEDFYVYLKNLLAEFEGADYFLEKIDREDFLRKQRTFDNGSIPYQIHLQEMRAILDKQAKFYPFLAKNKERIEKILTFRIPYYVGPLARGNSDFAWSIRKRNEKITPWNFEDVIDKESSAEAFINRMTSFDLYLPEEKVLPKHSLLYETFNVYNELTKVRFIAESMRDYQFLDSKQKKDIVRLYFKDKRKVTDKDIIEYLHAIYGYDGIELKGIEKQFNSSLSTYHDLLNIINDKEFLDDSSNEAIIEEIIHTLTIFEDREMIKQRLSKFENIFDKSVLKKLSRRHYTGWGKLSAKLINGIRDEKSGNTILDYLIDDGISNRNFMQLIHDDALSFKKKIQKAQIIGDEDKGNIKEVVKSLPGSPAIKKGILQSIKIVDELVKVMGGRKPESIVVEMARENQYTNQGKSNSQQRLKRLEKSLKELGSKILKENIPAKLSKIDNNALQNDRLYLYYLQNGKDMYTGDDLDIDRLSNYDIDHIIPQAFLKDNSIDNKVLVSSASARGKSDDFPSLEVVKKRKTFWYQLLKSKLISQRKFDNLTKAERGGLLPEDKAGFIQRQLVETRQITKHVARLLDEKFNNKKDENNRAVRTVKIITLKSTLVSQFRKDFELYKVREINDFHHAHDAYLNAVIASALLKKYPKLEPEFVYGDYPKYNSFRERKSATEKVYFYSNIMNIFKKSISLADGRVIERPLIEVNEETGESVWNKESDLATVRRVLSYPQVNVVKKVEEQNHGLDRGKPKGLFNANLSSKPKPNSNENLVGAKEYLDPKKYGGYAGISNSFAVLVKGTIEKGAKKKITNVLEFQGISILDRINYRKDKLNFLLEKGYKDIELIIELPKYSLFELSDGSRRMLASILSTNNKRGEIHKGNQIFLSQKFVKLLYHAKRISNTINENHRKYVENHKKEFEELFYYILEFNENYVGAKKNGKLLNSAFQSWQNHSIDELCSSFIGPTGSERKGLFELTSRGSAADFEFLGVKIPRYRDYTPSSLLKDATLIHQSVTGLYETRIDLAKLGEG

SEQ ID NO: 19 - protein, 1228 aa, Synthetic construct
MSKLEKFTNCYSLSKTLRFKAIPVGKTQENIDNKRLLVEDEKRAEDYKGVKKLLDRYYLSFINDVLHSIKLKNLNNYISLFRKKTRTEKENKELENLEINLRKEIAKAFKGNEGYKSLFKKDIIETILPEFLDDKDEIALVNSFNGFTTAFTGFFDNRENMFSEEAKSTSIAFRCINENLTRYISNMDIFEKVDAIFDKHEVQEIKEKILNSDYDVEDFFEGEFFNFVLTQEGIDVYNAIIGGFVTESGEKIKGLNEYINLYNQKTKQKLPKFKPLYKQVLSDRESLSFYGEGYTSDEEVLEVFRNTLNKNSEIFSSIKKLEKLFKNFDEYSSAGIFVKNGPAISTISKDIFGEWNVIRDKWNAEYDDIHLKKKAVVTEKYEDDRRKSFKKIGSFSLEQLQEYADADLSVVEKLKEIIIQKVDEIYKVYGSSEKLFDADFVLEKSLKKNDAVVAIMKDLLDSVKSFENYIKAFFGEGKETNRDESFYGDFVLAYDILLKVDHIYDAIRNYVTQKPYSKDKFKLYFQNPQFMGGWDKDKETDYRATILRYGSKYYLAIMDKKYAKCLQKIDKDDVNGNYEKINYKLLPGPNKMLPKVFFSKKWMAYYNPSEDIQKIYKNGTFKKGDMFNLNDCHKLIDFFKDSISRYPKWSNAYDFNFSETEKYKDIAGFYREVEEQGYKVSFESASKKEVDKLVEEGKLYMFQIYNKDFSDKSHGTPNLHTMYFKLLFDENNHGQIRLSGGAELFMRRASLKKEELVVHPANSPIANKNPDNPKKTTTLSYDVYKDKRFSEDQYELHIPIAINKCPKNIFKINTEVRVLLKHDDNPYVIGIARGERNLLYIVVVDGKGNIVEQYSLNEIINNFNGIRIKTDYHSLLDKKEKERFEARQNWTSIENIKELKAGYISQVVHKICELVEKYDAVIALEDLNSGFKNSRVKVEKQVYQKFEKMLIDKLNYMVDKKSNPCATGGALKGYQITNKFESFKSMSTQNGFIFYIPAWLTSKIDPSTGFVNLLKTKYTSIADSKKFISSFDRIMYVPEEDLFEFALDYKNFSRTDADYIKKWKLYSYGNRIRIFRNPKKNNVFDWEEVCLTSAYKELFNKYGINYQQGDIRALLCEQSDKAFYSSFMALMSLMLQMRNSITGRTDVDFLISPVKNSDGIFYDSRNYEAQENAILPKNADANGAYNIARKVLWAIGQFKKAEDEKLDKVKIAISNKEWLEYAQTSVKH

SEQ ID NO: 20 - protein, 1307 aa, Synthetic construct
MTQFEGFTNLYQVSKTLRFELIPQGKTLKHIQEQGFIEEDKARNDHYKELKPIIDRIYKTYADQCLQLVQLDWENLSAAIDSYRKEKTEETRNALIEEQATYRNAIHDYFIGRTDNLTDAINKRHAEIYKGLFKAELFNGKVLKQLGTVTTTEHENALLRSFDKFTTYFSGFYENRKNVFSAEDISTAIPHRIVQDNFPKFKENCHIFTRLITAVPSLREHFENVKKAIGIFVSTSIEEVFSFPFYNQLLTQTQIDLYNQLLGGISREAGTEKIKGLNEVLNLAIQKNDETAHIIASLPHRFIPLFKQILSDRNTLSFILEEFKSDEEVIQSFCKYKTLLRNENVLETAEALFNELNSIDLTHIFISHKKLETISSALCDHWDTLRNALYERRISELTGKITKSAKEKVQRSLKHEDINLQEIISAAGKELSEAFKQKTSEILSHAHAALDQPLPTTLKKQEEKEILKSQLDSLLGLYHLLDWFAVDESNEVDPEFSARLTGIKLEMEPSLSFYNKARNYATKKPYSVEKFKLNFQMPTLASGWDVNKEKNNGAILFVKNGLYYLGIMPKQKGRYKALSFEPTEKTSEGFDKMYYDYFPDAAKMIPKCSTQLKAVTAHFQTHTTPILLSNNFIEPLEITKEIYDLNNPEKEPKKFQTAYAKKTGDQKGYREALCKWIDFTRDFLSKYTKTTSIDLSSLRPSSQYKDLGEYYAELNPLLYHISFQRIAEKEIMDAVETGKLYLFQIYNKDFAKGHHGKPNLHTLYWTGLFSPENLAKTSIKLNGQAELFYRPKSRMKRMAHRLGEKMLNKKLKDQKTPIPDTLYQELYDYVNHRLSHDLSDEARALLPNVITKEVSHEIIKDRRFTSDKFFFHVPITLNYQAANSPSKFNQRVNAYLKEHPETPIIGIARGERNLIYITVIDSTGKILEQRSLNTIQQFDYQKKLDNREKERVAARQAWSVVGTIKDLKQGYLSQVIHEIVDLMIHYQAVVVLENLNFGFKSKRTGIAEKAVYQQFEKMLIDKLNCLVLKDYPAEKVGGVLNPYQLTDQFTSFAKMGTQSGFLFYVPAPYTSKIDPLTGFVDPFVWKTIKNHESRKHFLEGFDFLHYDVKTGDFILHFKMNRNLSFQRGLPGFMPAWDIVFEKNETQFDAKGTPFIAGKRIVPVIENHRFTGRYRDLYPANELIALLEEKGIVFRDGSNILPKLLENDDSHAIDTMVALIRSVLQMRNSNAATGEDYINSPVRDLNGVCFDSRFQNPEWPMDADANGAYHIALKGQLLLNHLKESKDLKLQNGISNQDWLAYIQELRN

SEQ ID NO: 21 - protein, 1307 aa, Synthetic construct
MTQFEGFTNLYQVSKTLRFELIPQGKTLKHIQEQGFIEEDKARNDHYKELKPIIDRIYKTYADQCLQLVQLDWENLSAAIDSYRKEKTEETRNALIEEQATYRNAIHDYFIGRTDNLTDAINKRHAEIYKGLFKAELFNGKVLKQLGTVTTTEHENALLRSFDKFTTYFSGFYRNRKNVFSAEDISTAIPHRIVQDNFPKFKENCHIFTRLITAVPSLREHFENVKKAIGIFVSTSIEEVFSFPFYNQLLTQTQIDLYNQLLGGISREAGTEKIKGLNEVLNLAIQKNDETAHIIASLPHRFIPLFKQILSDRNTLSFILEEFKSDEEVIQSFCKYKTLLRNENVLETAEALFNELNSIDLTHIFISHKKLETISSALCDHWDTLRNALYERRISELTGKITKSAKEKVQRSLKHEDINLQEIISAAGKELSEAFKQKTSEILSHAHAALDQPLPTTLKKQEEKEILKSQLDSLLGLYHLLDWFAVDESNEVDPEFSARLTGIKLEMEPSLSFYNKARNYATKKPYSVEKFKLNFQMPTLARGWDVNREKNNGAILFVKNGLYYLGIMPKQKGRYKALSFEPTEKTSEGFDKMYYDYFPDAAKMIPKCSTQLKAVTAHFQTHTTPILLSNNFIEPLEITKEIYDLNNPEKEPKKFQTAYAKKTGDQKGYREALCKWIDFTRDFLSKYTKTTSIDLSSLRPSSQYKDLGEYYAELNPLLYHISFQRIAEKEIMDAVETGKLYLFQIYNKDFAKGHHGKPNLHTLYWTGLFSPENLAKTSIKLNGQAELFYRPKSRMKRMAHRLGEKMLNKKLKDQKTPIPDTLYQELYDYVNHRLSHDLSDEARALLPNVITKEVSHEIIKDRRFTSDKFFFHVPITLNYQAANSPSKFNQRVNAYLKEHPETPIIGIARGERNLIYITVIDSTGKILEQRSLNTIQQFDYQKKLDNREKERVAARQAWSVVGTIKDLKQGYLSQVIHEIVDLMIHYQAVVVLENLNFGFKSKRTGIAEKAVYQQFEKMLIDKLNCLVLKDYPAEKVGGVLNPYQLTDQFTSFAKMGTQSGFLFYVPAPYTSKIDPLTGFVDPFVWKTIKNHESRKHFLEGFDFLHYDVKTGDFILHFKMNRNLSFQRGLPGFMPAWDIVFEKNETQFDAKGTPFIAGKRIVPVIENHRFTGRYRDLYPANELIALLEEKGIVFRDGSNILPKLLENDDSHAIDTMVALIRSVLQMRNSNAATGEDYINSPVRDLNGVCFDSRFQNPEWPMDADANGAYHIALKGQLLLNHLKESKDLKLQNGISNQDWLAYIQELRN

SEQ ID NO: 22 - protein, 1307 aa, Synthetic construct
MTQFEGFTNLYQVSKTLRFELIPQGKTLKHIQEQGFIEEDKARNDHYKELKPIIDRIYKTYADQCLQLVQLDWENLSAAIDSYRKEKTEETRNALIEEQATYRNAIHDYFIGRTDNLTDAINKRHAEIYKGLFKAELFNGKVLKQLGTVTTTEHENALLRSFDKFTTYFSGFYRNRKNVFSAEDISTAIPHRIVQDNFPKFKENCHIFTRLITAVPSLREHFENVKKAIGIFVSTSIEEVFSFPFYNQLLTQTQIDLYNQLLGGISREAGTEKIKGLNEVLALAIQKNDETAHIIASLPHRFIPLFKQILSDRNTLSFILEEFKSDEEVIQSFCKYKTLLRNENVLETAEALFNELNSIDLTHIFISHKKLETISSALCDHWDTLRNALYERRISELTGKITKSAKEKVQRSLKHEDINLQEIISAAGKELSEAFKQKTSEILSHAHAALDQPLPTTLKKQEEKEILKSQLDSLLGLYHLLDWFAVDESNEVDPEFSARLTGIKLEMEPSLSFYNKARNYATKKPYSVEKFKLNFQMPTLARGWDVNREKNNGAILFVKNGLYYLGIMPKQKGRYKALSFEPTEKTSEGFDKMYYDYFPDAAKMIPKCSTQLKAVTAHFQTHTTPILLSNNFIEPLEITKEIYDLNNPEKEPKKFQTAYAKKTGDQKGYREALCKWIDFTRDFLSKYTKTTSIDLSSLRPSSQYKDLGEYYAELNPLLYHISFQRIAEKEIMDAVETGKLYLFQIYNKDFAKGHHGKPNLHTLYWTGLFSPENLAKTSIKLNGQAELFYRPKSRMKRMAHRLGEKMLNKKLKDQKTPIPDTLYQELYDYVNHRLSHDLSDEARALLPNVITKEVSHEIIKDRRFTSDKFFFHVPITLNYQAANSPSKFNQRVNAYLKEHPETPIIGIARGERNLIYITVIDSTGKILEQRSLNTIQQFDYQKKLDNREKERVAARQAWSVVGTIKDLKQGYLSQVIHEIVDLMIHYQAVVVLENLNFGFKSKRTGIAEKAVYQQFEKMLIDKLNCLVLKDYPAEKVGGVLNPYQLTDQFTSFAKMGTQSGFLFYVPAPYTSKIDPLTGFVDPFVWKTIKNHESRKHFLEGFDFLHYDVKTGDFILHFKMNRNLSFQRGLPGFMPAWDIVFEKNETQFDAKGTPFIAGKRIVPVIENHRFTGRYRDLYPANELIALLEEKGIVFRDGSNILPKLLENDDSHAIDTMVALIRSVLQMRNSNAATGEDYINSPVRDLNGVCFDSRFQNPEWPMDADANGAYHIALKGQLLLNHLKESKDLKLQNGISNQDWLAYIQELRN

SEQ ID NO: 23 - protein, 1307 aa, Synthetic construct
MTQFEGFTNLYQVSKTLRFELIPQGKTLKHIQEQGFIEEDKARNDHYKELKPIIDRIYKTYADQCLQLVQLDWENLSAAIDSYRKEKTEETRNALIEEQATYRNAIHDYFIGRTDNLTDAINKRHAEIYKGLFKAELFNGKVLKQLGTVTTTEHENALLRSFDKFTTYFSGFYENRKNVFSAEDISTAIPHRIVQDNFPKFKENCHIFTRLITAVPSLREHFENVKKAIGIFVSTSIEEVFSFPFYNQLLTQTQIDLYNQLLGGISREAGTEKIKGLNEVLNLAIQKNDETAHIIASLPHRFIPLFKQILSDRNTLSFILEEFKSDEEVIQSFCKYKTLLRNENVLETAEALFNELNSIDLTHIFISHKKLETISSALCDHWDTLRNALYERRISELTGKITKSAKEKVQRSLKHEDINLQEIISAAGKELSEAFKQKTSEILSHAHAALDQPLPTTLKKQEEKEILKSQLDSLLGLYHLLDWFAVDESNEVDPEFSARLTGIKLEMEPSLSFYNKARNYATKKPYSVEKFKLNFQMPTLARGWDVNVEKNRGAILFVKNGLYYLGIMPKQKGRYKALSFEPTEKTSEGFDKMYYDYFPDAAKMIPKCSTQLKAVTAHFQTHTTPILLSNNFIEPLEITKEIYDLNNPEKEPKKFQTAYAKKTGDQKGYREALCKWIDFTRDFLSKYTKTTSIDLSSLRPSSQYKDLGEYYAELNPLLYHISFQRIAEKEIMDAVETGKLYLFQIYNKDFAKGHHGKPNLHTLYWTGLFSPENLAKTSIKLNGQAELFYRPKSRMKRMAHRLGEKMLNKKLKDQKTPIPDTLYQELYDYVNHRLSHDLSDEARALLPNVITKEVSHEIIKDRRFTSDKFFFHVPITLNYQAANSPSKFNQRVNAYLKEHPETPIIGIARGERNLIYITVIDSTGKILEQRSLNTIQQFDYQKKLDNREKERVAARQAWSVVGTIKDLKQGYLSQVIHEIVDLMIHYQAVVVLENLNFGFKSKRTGIAEKAVYQQFEKMLIDKLNCLVLKDYPAEKVGGVLNPYQLTDQFTSFAKMGTQSGFLFYVPAPYTSKIDPLTGFVDPFVWKTIKNHESRKHFLEGFDFLHYDVKTGDFILHFKMNRNLSFQRGLPGFMPAWDIVFEKNETQFDAKGTPFIAGKRIVPVIENHRFTGRYRDLYPANELIALLEEKGIVFRDGSNILPKLLENDDSHAIDTMVALIRSVLQMRNSNAATGEDYINSPVRDLNGVCFDSRFQNPEWPMDADANGAYHIALKGQLLLNHLKESKDLKLQNGISNQDWLAYIQELRN

SEQ ID NO: 24 - protein, 1307 aa, Synthetic construct
MTQFEGFTNLYQVSKTLRFELIPQGKTLKHIQEQGFIEEDKARNDHYKELKPIIDRIYKTYADQCLQLVQLDWENLSAAIDSYRKEKTEETRNALIEEQATYRNAIHDYFIGRTDNLTDAINKRHAEIYKGLFKAELFNGKVLKQLGTVTTTEHENALLRSFDKFTTYFSGFYENRKNVFSAEDISTAIPHRIVQDNFPKFKENCHIFTRLITAVPSLREHFENVKKAIGIFVSTSIEEVFSFPFYNQLLTQTQIDLYNQLLGGISREAGTEKIKGLNEVLNLAIQKNDETAHIIASLPHRFIPLFKQILSDRNTLSFILEEFKSDEEVIQSFCKYKTLLRNENVLETAEALFNELNSIDLTHIFISHKKLETISSALCDHWDTLRNALYERRISELTGKITKSAKEKVQRSLKHEDINLQEIISAAGKELSEAFKQKTSEILSHAHAALDQPLPTTLKKQEEKEILKSQLDSLLGLYHLLDWFAVDESNEVDPEFSARLTGIKLEMEPSLSFYNKARNYATKKPYSVEKFKLNFQMPTLARGWDVNKEKNNGAILFVKNGLYYLGIMPKQKGRYKALSFEPTEKTSEGFDKMYYDYFPDAAKMIPRCSTQLKAVTAHFQTHTTPILLSNNFIEPLEITKEIYDLNNPEKEPKKFQTAYAKKTGDQKGYREALCKWIDFTRDFLSKYTKTTSIDLSSLRPSSQYKDLGEYYAELNPLLYHISFQRIAEKEIMDAVETGKLYLFQIYNKDFAKGHHGKPNLHTLYWTGLFSPENLAKTSIKLNGQAELFYRPKSRMKRMAHRLGEKMLNKKLKDQKTPIPDTLYQELYDYVNHRLSHDLSDEARALLPNVITKEVSHEIIKDRRFTSDKFFFHVPITLNYQAANSPSKFNQRVNAYLKEHPETPIIGIARGERNLIYITVIDSTGKILEQRSLNTIQQFDYQKKLDNREKERVAARQAWSVVGTIKDLKQGYLSQVIHEIVDLMIHYQAVVVLENLNFGFKSKRTGIAEKAVYQQFEKMLIDKLNCLVLKDYPAEKVGGVLNPYQLTDQFTSFAKMGTQSGFLFYVPAPYTSKIDPLTGFVDPFVWKTIKNHESRKHFLEGFDFLHYDVKTGDFILHFKMNRNLSFQRGLPGFMPAWDIVFEKNETQFDAKGTPFIAGKRIVPVIENHRFTGRYRDLYPANELIALLEEKGIVFRDGSNILPKLLENDDSHAIDTMVALIRSVLQMRNSNAATGEDYINSPVRDLNGVCFDSRFQNPEWPMDADANGAYHIALKGQLLLNHLKESKDLKLQNGISNQDWLAYIQELRN

SEQ ID NO: 25 - protein, 986 aa, Synthetic construct
MEKRINKIRKKLSADNATKPVSRSGPMKTLLVRVMTDDLKKRLEKRRKKPEVMPQVISNNAANNLRMLLDDYTKMKEAILQVYWQEFKDDHVGLMCKFAQPASKKIDQNKLKPEMDEKGNLTTAGFACSQCGQPLFVYKLEQVSEKGKAYTNYFGRCNVAEHEKLILLAQLKPEKDSDEAVTYSLGKFGQRALDFYSIHVTKESTHPVKPLAQIAGNRYASGPVGKALSDACMGTIASFLSKYQDIIIEHQKVVKGNQKRLESLRELAGKENLEYPSVTLPPQPHTKEGVDAYNEVIARVRMWVNLNLWQKLKLSRDDAKPLLRLKGFPSFPVVERRENEVDWWNTINEVKKLIDAKRDMGRVFWSGVTAEKRNTILEGYNYLPNENDHKKREGSLENPKKPAKRQFGDLLLYLEKKYAGDWGKVFDEAWERIDKKIAGLTSHIEREEARNAEDAQSKAVLTDWLRAKASFVLERLKEMDEKEFYACEIQLQKWYGDLRGNPFAVEAENRVVDISGFSIGSDGHSIQYRNLLAWKYLENGKREFYLLMNYGKKGRIRFTDGTDIKKSGKWQGLLYGGGKAKVIDLTFDPDDEQLIILPLAFGTRQGREFIWNDLLSLETGLIKLANGRVIEKTIYNKKIGRDEPALFVALTFERREVVDPSNIKPVNLIGVARGENIPAVIALTDPEGCPLPEFKDSSGGPTDILRIGEGYKEKQRAIQAAKEVEQRRAGGYSRKFASKSRNLADDMVRNSARDLFYHAVTHDAVLVFANLSRGFGRQGKRTFMTERQYTKMEDWLTAKLAYEGLTSKTYLSKTLAQYTSKTCSNCGFTITTADYDGMLVRLKKTSDGWATTLNNKELKAEGQITYYNRYKRQTVEKELSAELDRLSEESGNNDISKWTKGRRDEALFLLKKRFSHRPVQEQFVCLDCGHEVHAAEQAALNIARSWLFLNSNSTEFKSYKSGKQPFVGAWQAFYKRRLKEVWKPNA

SEQ ID NO: 26 - protein, 757 aa, Synthetic construct
MPKPAVESEFSKVLKKHFPGERFRSSYMKRGGKILAAQGEEAVVAYLQGKSEEEPPNFQPPAKCHVVTKSRDFAEWPIMKASEAIQRYIYALSTTERAACKPGKSSESHAAWFAATGVSNHGYSHVQGLNLIFDHTLGRYDGVLKKVQLRNEKARARLESINASRADEGLPEIKAEEEEVATNETGHLLQPPGINPSFYVYQTISPQAYRPRDEIVLPPEYAGYVRDPNAPIPLGVVRNRCDIQKGCPGYIPEWQREAGTAISPKTGKAVTVPGLSPKKNKRMRRYWRSEKEKAQDALLVTVRIGTDWVVIDVRGLLRNARWRTIAPKDISLNALLDLFTGDPVIDVRRNIVTFTYTLDACGTYARKWTLKGKQTKATLDKLTATQTVALVAIALGQTNPISAGISRVTQENGALQCEPLDRFTLPDDLLKDISAYRIAWDRNEEELRARSVEALPEAQQAEVRALDGVSKETARTQLCADFGLDPKRLPWDKMSSNTTFISEALLSNSVSRDQVFFTPAPKKGAKKKAPVEVMRKDRTWARAYKPRLSVEAQKLKNEALWALKRTSPEYLKLSRRKEELCRRSINYVIEKTRRRTQCQIVIPVIEDLNVRFFHGSGKRLPGWDNFFTAKKENRWFIQGLHKAFSDLRTHRSFYVFEVRPERTSITCPKCGHCEVGNRDGEAFQCLSCGKTCNADLDVATHNLTQVALTGKTMPKREEPRDAQGTAPARKTKKASKSKAPPAEREDQTPAQEPSQTS

SEQ ID NO: 27 - protein, 1368 aa, Synthetic construct
MDKKYSIGLAIGTNSVGWAVITDEYKVPSKKFKVLGNTDRHSIKKNLIGALLFDSGETAEATRLKRTARRRYTRRKNRICYLQEIFSNEMAKVDDSFFHRLEESFLVEEDKKHERHPIFGNIVDEVAYHEKYPTIYHLRKKLVDSTDKADLRLIYLALAHMIKFRGHFLIEGDLNPDNSDVDKLFIQLVQTYNQLFEENPINASGVDAKAILSARLSKSRRLENLIAQLPGEKKNGLFGNLIALSLGLTPNFKSNFDLAEDAKLQLSKDTYDDDLDNLLAQIGDQYADLFLAAKNLSDAILLSDILRVNTEITKAPLSASMIKRYDEHHQDLTLLKALVRQQLPEKYKEIFFDQSKNGYAGYIDGGASQEEFYKFIKPILEKMDGTEELLVKLNREDLLRKQRTFDNGSIPHQIHLGELHAILRRQEDFYPFLKDNREKIEKILTFRIPYYVGPLARGNSRFAWMTRKSEETITPWNFEEVVDKGASAQSFIERMTNFDKNLPNEKVLPKHSLLYEYFTVYNELTKVKYVTEGMRKPAFLSGEQKKAIVDLLFKTNRKVTVKQLKEDYFKKIECFDSVEISGVEDRFNASLGTYHDLLKIIKDKDFLDNEENEDILEDIVLTLTLFEDREMIEERLKTYAHLFDDKVMKQLKRRRYTGWGRLSRKLINGIRDKQSGKTILDFLKSDGFANRNFMQLIHDDSLTFKEDIQKAQVSGQGDSLHEHIANLAGSPAIKKGILQTVKVVDELVKVMGRHKPENIVIEMARENQTTQKGQKNSRERMKRIEEGIKELGSQILKEHPVENTQLQNEKLYLYYLQNGRDMYVDQELDINRLSDYDVDAIVPQSFLKDDSIDNKVLTRSDKNRGKSDNVPSEEVVKKMKNYWRQLLNAKLITQRKFDNLTKAERGGLSELDKAGFIKRQLVETRQITKHVAQILDSRMNTKYDENDKLIREVKVITLKSKLVSDFRKDFQFYKVREINNYHHAHDAYLNAVVGTALIKKYPKLESEFVYGDYKVYDVRKMIAKSEQEIGKATAKYFFYSNIMNFFKTEITLANGEIRKRPLIETNGETGEIVWDKGRDFATVRKVLSMPQVNIVKKTEVQTGGFSKESILPKRNSDKLIARKKDWDPKKYGGFVSPTVAYSVLVVAKVEKGKSKKLKSVKELLGITIMERSSFEKNPIDFLEAKGYKEVKKDLIIKLPKYSLFELENGRKRMLASARELQKGNELALPSKYVNFLYLASHYEKLKGSPEDNEQKQLFVEQHKHYLDEIIEQISEFSKRVILADANLDKVLSAYNKHRDKPIREQAENIIHLFTLTNLGAPAAFKYFDTTIDRKEYRSTKEVLDATLIHQSITGLYETRIDLSQLGGD

SEQ ID NO: 28 - protein, 1368 aa, Synthetic construct
MDKKYSIGLAIGTNSVGWAVITDEYKVPSKKFKVLGNTDRHSIKKNLIGALLFDSGETAEATRLKRTARRRYTRRKNRICYLQEIFSNEMAKVDDSFFHRLEESFLVEEDKKHERHPIFGNIVDEVAYHEKYPTIYHLRKKLVDSTDKADLRLIYLALAHMIKFRGHFLIEGDLNPDNSDVDKLFIQLVQTYNQLFEENPINASGVDAKAILSARLSKSRRLENLIAQLPGEKKNGLFGNLIALSLGLTPNFKSNFDLAEDAKLQLSKDTYDDDLDNLLAQIGDQYADLFLAAKNLSDAILLSDILRVNTEITKAPLSASMIKRYDEHHQDLTLLKALVRQQLPEKYKEIFFDQSKNGYAGYIDGGASQEEFYKFIKPILEKMDGTEELLVKLNREDLLRKQRTFDNGSIPHQIHLGELHAILRRQEDFYPFLKDNREKIEKILTFRIPYYVGPLARGNSRFAWMTRKSEETITPWNFEEVVDKGASAQSFIERMTNFDKNLPNEKVLPKHSLLYEYFTVYNELTKVKYVTEGMRKPAFLSGEQKKAIVDLLFKTNRKVTVKQLKEDYFKKIECFDSVEISGVEDRFNASLGTYHDLLKIIKDKDFLDNEENEDILEDIVLTLTLFEDREMIEERLKTYAHLFDDKVMKQLKRRRYTGWGRLSRKLINGIRDKQSGKTILDFLKSDGFANRNFMQLIHDDSLTFKEDIQKAQVSGQGDSLHEHIANLAGSPAIKKGILQTVKVVDELVKVMGRHKPENIVIEMARENQTTQKGQKNSRERMKRIEEGIKELGSQILKEHPVENTQLQNEKLYLYYLQNGRDMYVDQELDINRLSDYDVDAIVPQSFLKDDSIDNKVLTRSDKNRGKSDNVPSEEVVKKMKNYWRQLLNAKLITQRKFDNLTKAERGGLSELDKAGFIKRQLVETRQITKHVAQILDSRMNTKYDENDKLIREVKVITLKSKLVSDFRKDFQFYKVREINNYHHAHDAYLNAVVGTALIKKYPKLESEFVYGDYKVYDVRKMIAKSEQEIGKATAKYFFYSNIMNFFKTEITLANGEIRKRPLIETNGETGEIVWDKGRDFATVRKVLSMPQVNIVKKTEVQTGGFSKESILPKRNSDKLIARKKDWDPKKYGGFESPTVAYSVLVVAKVEKGKSKKLKSVKELLGITIMERSSFEKNPIDFLEAKGYKEVKKDLIIKLPKYSLFELENGRKRMLASAGELQKGNELALPSKYVNFLYLASHYEKLKGSPEDNEQKQLFVEQHKHYLDEIIEQISEFSKRVILADANLDKVLSAYNKHRDKPIREQAENIIHLFTLTNLGAPAAFKYFDTTIDRKQYRSTKEVLDATLIHQSITGLYETRIDLSQLGGD

SEQ ID NO: 29 - protein, 1368 aa, Synthetic construct
MDKKYSIGLAIGTNSVGWAVITDEYKVPSKKFKVLGNTDRHSIKKNLIGALLFDSGETAEATRLKRTARRRYTRRKNRICYLQEIFSNEMAKVDDSFFHRLEESFLVEEDKKHERHPIFGNIVDEVAYHEKYPTIYHLRKKLVDSTDKADLRLIYLALAHMIKFRGHFLIEGDLNPDNSDVDKLFIQLVQTYNQLFEENPINASGVDAKAILSARLSKSRRLENLIAQLPGEKKNGLFGNLIALSLGLTPNFKSNFDLAEDAKLQLSKDTYDDDLDNLLAQIGDQYADLFLAAKNLSDAILLSDILRVNTEITKAPLSASMIKRYDEHHQDLTLLKALVRQQLPEKYKEIFFDQSKNGYAGYIDGGASQEEFYKFIKPILEKMDGTEELLVKLNREDLLRKQRTFDNGSIPHQIHLGELHAILRRQEDFYPFLKDNREKIEKILTFRIPYYVGPLARGNSRFAWMTRKSEETITPWNFEEVVDKGASAQSFIERMTNFDKNLPNEKVLPKHSLLYEYFTVYNELTKVKYVTEGMRKPAFLSGEQKKAIVDLLFKTNRKVTVKQLKEDYFKKIECFDSVEISGVEDRFNASLGTYHDLLKIIKDKDFLDNEENEDILEDIVLTLTLFEDREMIEERLKTYAHLFDDKVMKQLKRRRYTGWGRLSRKLINGIRDKQSGKTILDFLKSDGFANRNFMQLIHDDSLTFKEDIQKAQVSGQGDSLHEHIANLAGSPAIKKGILQTVKVVDELVKVMGRHKPENIVIEMARENQTTQKGQKNSRERMKRIEEGIKELGSQILKEHPVENTQLQNEKLYLYYLQNGRDMYVDQELDINRLSDYDVDAIVPQSFLKDDSIDNKVLTRSDKNRGKSDNVPSEEVVKKMKNYWRQLLNAKLITQRKFDNLTKAERGGLSELDKAGFIKRQLVETRQITKHVAQILDSRMNTKYDENDKLIREVKVITLKSKLVSDFRKDFQFYKVREINNYHHAHDAYLNAVVGTALIKKYPKLESEFVYGDYKVYDVRKMIAKSEQEIGKATAKYFFYSNIMNFFKTEITLANGEIRKRPLIETNGETGEIVWDKGRDFATVRKVLSMPQVNIVKKTEVQTGGFSKESILPKRNSDKLIARKKDWDPKKYGGFVSPTVAYSVLVVAKVEKGKSKKLKSVKELLGITIMERSSFEKNPIDFLEAKGYKEVKKDLIIKLPKYSLFELENGRKRMLASAGELQKGNELALPSKYVNFLYLASHYEKLKGSPEDNEQKQLFVEQHKHYLDEIIEQISEFSKRVILADANLDKVLSAYNKHRDKPIREQAENIIHLFTLTNLGAPAAFKYFDTTIDRKQYRSTKEVLDATLIHQSITGLYETRIDLSQLGGD

SEQ ID NO: 30 - protein, 1368 aa, Synthetic construct
MDKKYSIGLAIGTNSVGWAVITDEYKVPSKKFKVLGNTDRHSIKKNLIGALLFDSGETAEATRLKRTARRRYTRRKNRICYLQEIFSNEMAKVDDSFFHRLEESFLVEEDKKHERHPIFGNIVDEVAYHEKYPTIYHLRKKLVDSTDKADLRLIYLALAHMIKFRGHFLIEGDLNPDNSDVDKLFIQLVQTYNQLFEENPINASGVDAKAILSARLSKSRRLENLIAQLPGEKKNGLFGNLIALSLGLTPNFKSNFDLAEDAKLQLSKDTYDDDLDNLLAQIGDQYADLFLAAKNLSDAILLSDILRVNTEITKAPLSASMIKRYDEHHQDLTLLKALVRQQLPEKYKEIFFDQSKNGYAGYIDGGASQEEFYKFIKPILEKMDGTEELLVKLNREDLLRKQRTFDNGSIPHQIHLGELHAILRRQEDFYPFLKDNREKIEKILTFRIPYYVGPLARGNSRFAWMTRKSEETITPWNFEEVVDKGASAQSFIERMTNFDKNLPNEKVLPKHSLLYEYFTVYNELTKVKYVTEGMRKPAFLSGEQKKAIVDLLFKTNRKVTVKQLKEDYFKKIECFDSVEISGVEDRFNASLGTYHDLLKIIKDKDFLDNEENEDILEDIVLTLTLFEDREMIEERLKTYAHLFDDKVMKQLKRRRYTGWGRLSRKLINGIRDKQSGKTILDFLKSDGFANRNFMQLIHDDSLTFKEDIQKAQVSGQGDSLHEHIANLAGSPAIKKGILQTVKVVDELVKVMGRHKPENIVIEMARENQTTQKGQKNSRERMKRIEEGIKELGSQILKEHPVENTQLQNEKLYLYYLQNGRDMYVDQELDINRLSDYDVDAIVPQSFLKDDSIDNKVLTRSDKNRGKSDNVPSEEVVKKMKNYWRQLLNAKLITQRKFDNLTKAERGGLSELDKAGFIKRQLVETRQITKHVAQILDSRMNTKYDENDKLIREVKVITLKSKLVSDFRKDFQFYKVREINNYHHAHDAYLNAVVGTALIKKYPKLESEFVYGDYKVYDVRKMIAKSEQEIGKATAKYFFYSNIMNFFKTEITLANGEIRKRPLIETNGETGEIVWDKGRDFATVRKVLSMPQVNIVKKTEVQTGGFSKESILPKRNSDKLIARKKDWDPKKYGGFLWPTVAYSVLVVAKVEKGKSKKLKSVKELLGITIMERSSFEKNPIDFLEAKGYKEVKKDLIIKLPKYSLFELENGRKRMLASAKQLQKGNELALPSKYVNFLYLASHYEKLKGSPEDNEQKQLFVEQHKHYLDEIIEQISEFSKRVILADANLDKVLSAYNKHRDKPIREQAENIIHLFTLTNLGAPAAFKYFDTTIDRKQYRSTKEVLDATLIHQSITGLYETRIDLSQLGGD

SEQ ID NO: 31 - protein, 1368 aa, Synthetic construct
MDKKYSIGLAIGTNSVGWAVITDEYKVPSKKFKVLGNTDRHSIKKNLIGALLFDSGETAERTRLKRTARRRYTRRKNRICYLQEIFSNEMAKVDDSFFHRLEESFLVEEDKKHERHPIFGNIVDEVAYHEKYPTIYHLRKKLVDSTDKADLRLIYLALAHMIKFRGHFLIEGDLNPDNSDVDKLFIQLVQTYNQLFEENPINASGVDAKAILSARLSKSRRLENLIAQLPGEKKNGLFGNLIALSLGLTPNFKSNFDLAEDAKLQLSKDTYDDDLDNLLAQIGDQYADLFLAAKNLSDAILLSDILRVNTEITKAPLSASMIKRYDEHHQDLTLLKALVRQQLPEKYKEIFFDQSKNGYAGYIDGGASQEEFYKFIKPILEKMDGTEELLVKLNREDLLRKQRTFDNGSIPHQIHLGELHAILRRQEDFYPFLKDNREKIEKILTFRIPYYVGPLARGNSRFAWMTRKSEETITPWNFEEVVDKGASAQSFIERMTNFDKNLPNEKVLPKHSLLYEYFTVYNELTKVKYVTEGMRKPAFLSGEQKKAIVDLLFKTNRKVTVKQLKEDYFKKIECFDSVEISGVEDRFNASLGTYHDLLKIIKDKDFLDNEENEDILEDIVLTLTLFEDREMIEERLKTYAHLFDDKVMKQLKRRRYTGWGRLSRKLINGIRDKQSGKTILDFLKSDGFANRNFMQLIHDDSLTFKEDIQKAQVSGQGDSLHEHIANLAGSPAIKKGILQTVKVVDELVKVMGRHKPENIVIEMARENQTTQKGQKNSRERMKRIEEGIKELGSQILKEHPVENTQLQNEKLYLYYLQNGRDMYVDQELDINRLSDYDVDAIVPQSFLKDDSIDNKVLTRSDKNRGKSDNVPSEEVVKKMKNYWRQLLNAKLITQRKFDNLTKAERGGLSELDKAGFIKRQLVETRQITKHVAQILDSRMNTKYDENDKLIREVKVITLKSKLVSDFRKDFQFYKVREINNYHHAHDAYLNAVVGTALIKKYPKLESEFVYGDYKVYDVRKMIAKSEQEIGKATAKYFFYSNIMNFFKTEITLANGEIRKRPLIETNGETGEIVWDKGRDFATVRKVLSMPQVNIVKKTEVQTGGFSKESIRPKRNSDKLIARKKDWDPKKYGGFLWPTVAYSVLVVAKVEKGKSKKLKSVKELLGITIMERSSFEKNPIDFLEAKGYKEVKKDLIIKLPKYSLFELENGRKRMLASAKQLQKGNELALPSKYVNFLYLASHYEKLKGSPEDNEQKQLFVEQHKHYLDEIIEQISEFSKRVILADANLDKVLSAYNKHRDKPIREQAENIIHLFTLTRLGAPRAFKYFDTTIDPKQYRSTKEVLDATLIHQSITGLYETRIDLSQLGGD

SEQ ID NO: 32 - protein, 1053 aa, Synthetic construct
MKRNYILGLAIGITSVGYGIIDYETRDVIDAGVRLFKEANVENNEGRRSKRGARRLKRRRRHRIQRVKKLLFDYNLLTDHSELSGINPYEARVKGLSQKLSEEEFSAALLHLAKRRGVHNVNEVEEDTGNELSTKEQISRNSKALEEKYVAELQLERLKKDGEVRGSINRFKTSDYVKEAKQLLKVQKAYHQLDQSFIDTYIDLLETRRTYYEGPGEGSPFGWKDIKEWYEMLMGHCTYFPEELRSVKYAYNADLYNALNDLNNLVITRDENEKLEYYEKFQIIENVFKQKKKPTLKQIAKEILVNEEDIKGYRVTSTGKPEFTNLKVYHDIKDITARKEIIENAELLDQIAKILTIYQSSEDIQEELTNLNSELTQEEIEQISNLKGYTGTHNLSLKAINLILDELWHTNDNQIAIFNRLKLVPKKVDLSQQKEIPTTLVDDFILSPVVKRSFIQSIKVINAIIKKYGLPNDIIIELAREKNSKDAQKMINEMQKRNRQTNERIEEIIRTTGKENAKYLIEKIKLHDMQEGKCLYSLEAIPLEDLLNNPFNYEVDHIIPRSVSFDNSFNNKVLVKQEEASKKGNRTPFQYLSSSDSKISYETFKKHILNLAKGKGRISKTKKEYLLEERDINRFSVQKDFINRNLVDTRYATRGLMNLLRSYFRVNNLDVKVKSINGGFTSFLRRKWKFKKERNKGYKHHAEDALIIANADFIFKEWKKLDKAKKVMENQMFEEKQAESMPEIETEQEYKEIFITPHQIKHIKDFKDYKYSHRVDKKPNRKLINDTLYSTRKDDKGNTLIVNNLNGLYDKDNDKLKKLINKSPEKLLMYHHDPQTYQKLKLIMEQYGDEKNPLYKYYEETGNYLTKYSKKDNGPVIKKIKYYGNKLNAHLDITDDYPNSRNKVVKLSLKPYRFDVYLDNGVYKFVTVKNLDVIKKENYYEVNSKCYEEAKKLKKISNQAEFIASFYKNDLIKINGELYRVIGVNNDLLNRIEVNMIDITYREYLENMNDKRPPHIIKTIASKTQSIKKYSTDILGNLYEVKSKKHPQIIKKG

SEQ ID NO: 33 - protein, 100 aa, Synthetic construct
MNNSQGRVTFEDVTVNFTQGEWQRLNPEQRNLYRDVMLENYSNLVSVGQGETTKPDVILRLEQGKEPWLEEEEVLGSGRAEKNGDIGGQIWKPKDVKESL

SEQ ID NO: 34 - protein, 106 aa, Synthetic construct
MAATLLMAGSQAPVTFEDMAMYLTREEWRPLDAAQRDLYRDVMQENYGNVVSLDFEIRSENEVNPKQEISEDVQFGTTSERPAENAEENPESEEGFESGDRSERQW

SEQ ID NO: 35 - protein, 95 aa, Synthetic construct
MLENYRNLVFLGIAVSKPDLITCLEQGKEPCNMKRHEMVAKPPVMCSHIAEDLCPERDIKYFFQKVILRRYDKCEHENLQLRKGCKSVDECKVCK

SEQ ID NO: 36 - protein, 95 aa, Synthetic construct
MGLLTFRDVAIEFSLEEWQCLDTAQRNLYKNVILENYRNLVFLGIAVSKQDLITCLEQEKEPLTVKRHEMVNEPPVMCSHFAQEFWPEQNIKDSF

SEQ ID NO: 37 - protein, 116 aa, Synthetic construct
MLQMQNSEHHGQSIKTQTDSISLEDVAVNFTLEEWALLDPGQRNIYRDVMRATFKNLACIGEKWKDQDIEDEHKNQGRNLRSPMVEALCENKEDCPCGKSTSQIPDLNTNLETPTG

SEQ ID NO: 38 - protein, 100 aa, Synthetic construct
MALSQGLLTFRDVAIEFSQEEWKCLDPAQRTLYRDVMLENYRNLVSLDISSKCMMNTLSSTGQGNTEVIHTGTLQRQASYHIGAFCSQEIEKDIHDFVFQ

SEQ ID NO: 39 - protein, 98 aa, Synthetic construct
MAQGLVTFADVAIDFSQEEWACLNSAQRDLYWDVMLENYSNLVSLDLESAYENKSLPTKKNIHEIRASKRNSDRRSKSLGRNWICEGTLERPQRSRGR

SEQ ID NO: 40 - protein, 118 aa, Synthetic construct
MLREEATKKSKEKEPGMALPQGRLTFRDVAIEFSLEEWKCLNPAQRALYRAVMLENYRNLEFVDSSLKSMMEFSSTRHSITGEVIHTGTLQRHKSHHIGDFCFPEMKKDIHHFEFQWQ

SEQ ID NO: 41 - protein, 104 aa, Synthetic construct
MPGPPGSLEMGPLTFRDVAIEFSLEEWQCLDTAQRNLYRKVMFENYRNLVFLGIAVSKPHLITCLEQGKEPWNRKRQEMVAKPPVIYSHFTEDLWPEHSIKDSF

SEQ ID NO: 42 - protein, 113 aa, Synthetic construct
MSPPWSPALAAEGRGSSCEASVSFEDVTVDFSKEEWQHLDPAQRRLYWDVTLENYSHLLSVGYQIPKSEAAFKLEQGEGPWMLEGEAPHQSCSGEAIGKMQQQGIPGGIFFHC

SEQ ID NO: 43 - protein, 109 aa, Synthetic construct
MASPSPPPESKEEWDYLDPAQRSLYKDVMMENYGNLVSLDVLNRDKDEEPTVKQEIEEIEEEVEPQGVIVTRIKSEIDQDPMGRETFELVGRLDKQRGIFLWEIPRESL

SEQ ID NO: 44 - protein, 99 aa, Synthetic construct
MALTQGPLKFMDVAIEFSQEEWKCLDPAQRTLYRDVMLENYRNLVSLGICLPDLSVTSMLEQKRDPWTLQSEEKIANDPDGRECIKGVNTERSSKLGSN

SEQ ID NO: 45 - protein, 100 aa, Synthetic construct
MAASAQVSVTFEDVAVTFTQEEWGQLDAAQRTLYQEVMLETCGLLMSLGCPLFKPELIYQLDHRQELWMATKDLSQSSYPGDNTKPKTTEPTFSHLALPE

SEQ ID NO: 46 - protein, 144 aa, Synthetic construct
MFSQEERMAAGYLPRWSQELVTFEDVSMDFSQEEWELLEPAQKNLYREVMLENYRNVVSLEALKNQCTDVGIKEGPLSPAQTSQVTSLSSWTGYLLFQPVASSHLEQREALWIEEKGTPQASCSDWMTVLRNQDSTYKKVALQE

SEQ ID NO: 47 - protein, 97 aa, Synthetic construct
MSQGSVTFRDVAIDFSQEEWKWLQPAQRDLYRCVMLENYGHLVSLGLSISKPDVVSLLEQGKEPWLGKREVKRDLFSVSESSGEIKDFSPKNVIYDD

SEQ ID NO: 48 - protein, 112 aa, Synthetic construct
MEEAQKRKAKESGMALPQGRLTFMDVAIEFSQEEWKSLDPGQRALYRDVMLENYRNLVFLGRSCVLGSNAENKPIKNQLGLTLESHLSELQLFQAGRKIYRSNQVEKFTNHR

SEQ ID NO: 49 - protein, 105 aa, Synthetic construct
MAAAVLTDRAQVSVTFDDVAVTFTKEEWGQLDLAQRTLYQEVMLENCGLLVSLGCPVPKAELICHLEHGQEPWTRKEDLSQDTCPGDKGKPKTTEPTTCEPALSE

SEQ ID NO: 50 - protein, 99 aa, Synthetic construct
MIQAQESITLEDVAVDFTWEEWQLLGAAQKDLYRDVMLENYSNLVAVGYQASKPDALFKLEQGEQLWTIEDGIHSGACSDIWKVDHVLERLQSESLVNR

SEQ ID NO: 51 - protein, 112 aa, Synthetic construct
MEGVAGVMSVGPPAARLQEPVTFRDVAVDFTQEEWGQLDPTQRILYRDVMLETFGHLLSIGPELPKPEVISQLEQGTELWVAERGTTQGCHPAWEPRSESQASRKEEGLPEE

SEQ ID NO: 52 - protein, 97 aa, Synthetic construct
MSLGSELFRDVAIVFSQEEWQWLAPAQRDLYRDVMLETYSNLVSLGLAVSKPDVISFLEQGKEPWMVERVVSGGLCPVLESRYDTKELFPKQHVYEV

SEQ ID NO: 53 - protein, 105 aa, Synthetic construct
MAHKYVGLQYHGSVTFEDVAIAFSQQEWESLDSSQRGLYRDVMLENYRNLVSMAGHSRSKPHVIALLEQWKEPEVTVRKDGRRWCTDLQLEDDTIGCKEMPTSEN

SEQ ID NO: 54 - protein, 92 aa, Synthetic construct
MAFEDVAVYFSQEEWGLLDTAQRALYRRVMLDNFALVASLGLSTSRPRVVIQLERGEEPWVPSGTDTTLSRTTYRRRNPGSWSLTEDRDVSG

SEQ ID NO: 55 - protein, 104 aa, Synthetic construct
MLENYRNLVFVGIAASKPDLITCLEQGKEPWNVKRHEMVTEPPVVYSYFAQDLWPKQGKKNYFQKVILRTYKKCGRENLQLRKYCKSMDECKVHKECYNGLNQC

SEQ ID NO: 56 - protein, 127 aa, Synthetic construct
MHFRRPDPCREPLASPIQDSVAFEDVAVNFTQEEWALLDSSQKNLYREVMQETCRNLASVGSQWKDQNIEDHFEKPGKDIRNHIVQRLCESKEDGQYGEVVSQIPNLDLNENISTGLKPCECSICGK

SEQ ID NO: 57 - protein, 110 aa, Synthetic construct
MALSQGLFTFKDVAIEFSQEEWECLDPAQRALYRDVMLENYRNLLSLDEDNIPPEDDISVGFTSKGLSPKENNKEELYHLVILERKESHGINNFDLKEVWENMPKFDSLW

SEQ ID NO: 58 - protein, 98 aa, Synthetic construct
MTFEDIIVDFTQEEWALLDTSQRKLFQDVMLENISHLVSIGKQLCKSVVLSQLEQVEKLSTQRISLLQGREVGIKHQEIPFIHHIYQKGTSTISTMRS

SEQ ID NO: 59 - protein, 103 aa, Synthetic construct
MAVTFEDVTIIFTWEEWKFLDSSQKRLYREVMWENYTNVMSVENWNESYKSQEEKFRYLEYENFSYWQGWWNAGAQMYENQNYGETVQGTDSKDLTQQDRSQC

SEQ ID NO: 60 - protein, 99 aa, Synthetic construct
MITSQGSVSFRDVTVGFTQEEWQHLDPAQRTLYRDVMLENYSHLVSVGYCIPKPEVILKLEKGEEPWILEEKFPSQSHLELINTSRNYSIMKFNEFNKG

SEQ ID NO: 61 - protein, 114 aa, Synthetic construct
MFEDVAVYLSREEWGRLGPAQRGLYRDVMLETYGNLVSLGVGPAGPKPGVISQLERGDEPWVLDVQGTSGKEHLRVNSPALGTRTEYKELTSQETFGEEDPQGSEPVEACDHIS

SEQ ID NO: 62 - protein, 112 aa, Synthetic construct
METYGNVVSLGLPGSKPDIISQLERGEDPWVLDRKGAKKSQGLWSDYSDNLKYDHTTACTQQDSLSCPWECETKGESQNTDLSPKPLISEQTVILGKTPLGRIDQENNETKQ

SEQ ID NO: 63 - protein, 102 aa, Synthetic construct
MAEMNPAQGHVVFEDVAIYFSQEEWGHLDEAQRLLYRDVMLENLALLSSLGCCHGAEDEEAPLEPGVSVGVSQVMAPKPCLSTQNTQPCETCSSLLKDILRL

SEQ ID NO: 64 - protein, 62 aa, Synthetic construct
MLDNYRNLVFLGIAVSKPDLITCLEQGKEPCNMKRHAMVAKPPVVCSHFAQDLWPKQGLKDS

SEQ ID NO: 65 - protein, 105 aa, Synthetic construct
MAAGQREARPQVSLTFEDVAVLFTRDEWRKLAPSQRNLYRDVMLENYRNLVSLGLPFTKPKVISLLQQGEDPWEVEKDGSGVSSLGSKSSHKTTKSTQTQDSSFQ

SEQ ID NO: 66 - protein, 97 aa, Synthetic construct
MALRSVMFSDVSIDFSPEEWEYLDLEQKDLYRDVMLENYSNLVSLGCFISKPDVISSLEQGKEPWKVVRKGRRQYPDLETKYETKKLSLENDIYEIN

SEQ ID NO: 67 - protein, 98 aa, Synthetic construct
MTTFKEAMTFKDVAVVFTEEELGLLDLAQRKLYRDVMLENFRNLLSVGHQAFHRDTFHFLREEKIWMMKTAIQREGNSGDKIQTEMETVSEAGTHQEW

SEQ ID NO: 68 - protein, 103 aa, Synthetic construct
MFQVEQKSQESVSFKDVTVGFTQEEWQHLDPSQRALYRDVMLENYSNLVSVGYCVHKPEVIFRLQQGEEPWKQEEEFPSQSFPEVWTADHLKERSQENQSKHL

SEQ ID NO: 69 - protein, 98 aa, Synthetic construct
MTKSKEAVTFKDVAVVFSEEELQLLDLAQRKLYRDVMLENFRNVVSVGHQSTPDGLPQLEREEKLWMMKMATQRDNSSGAKNLKEMETLQEVGLRYLP

SEQ ID NO: 70 - protein, 112 aa, Synthetic construct
MSQKPQVLGPEKQDGSCEASVSFEDVTVDFSREEWQQLDPAQRCLYRDVMLELYSHLFAVGYHIPNPEVIFRMLKEKEPRVEEAEVSHQRCQEREFGLEIPQKEISKKASFQ

SEQ ID NO: 71 - protein, 95 aa, Synthetic construct
MELVTFRDVAIEFSPEEWKCLDPAQQNLYRDVMLENYRNLVSLGFVISNPDLVTCLEQIKEPCNLKIHETAAKPPAICSPFSQDLSPVQGIEDSF

SEQ ID NO: 72 - protein, 112 aa, Synthetic construct
MSTLLQGGHNLLSSASFQESVTFKDVIVDFTQEEWKQLDPGQRDLFRDVTLENYTHLVSIGLQVSKPDVISQLEQGTEPWIMEPSIPVGTCADWETRLENSVSAPEPDISEE

SEQ ID NO: 73 - protein, 112 aa, Synthetic construct
MDPAQVPVAADLLTDHEEGYVTFEDVAVYFSQEEWRLLDDAQRLLYRNVMLENFTLLASLGLASSKTHEITQLESWEEPFMPAWEVVTSAIPRGCWHGAEAEEAPEQIASVG

SEQ ID NO: 74 - protein, 112 aa, Synthetic construct
MKKLEAVGTGIEPKAMSQGLVTFGDVAVDFSQEEWEWLNPIQRNLYRKVMLENYRNLASLGLCVSKPDVISSLEQGKEPWTVKRKMTRAWCPDLKAVWKIKELPLKKDFCEG

SEQ ID NO: 75 - protein, 108 aa, Synthetic construct
MSLLGEHWDYDALFETQPGLVTIKNLAVDFRQQLHPAQKNFCKNGIWENNSDLGSAGHCVAKPDLVSLLEQEKEPWMVKRELTGSLFSGQRSVHETQELFPKQDSYAE

SEQ ID NO: 76 - protein, 113 aa, Synthetic construct
MLALAASQPARLEERLIRDRDLGASLLPAAPQEQWRQLDSTQKEQYWDLILETYGKMVSGAGISHPKSDLTNSIEFGEELAGIYLHVNEKIPRPTCIGDRQENDKENLNLENH

SEQ ID NO: 77 - protein, 131 aa, Synthetic construct
MEGRPGETTDTCFVSGVHGPVALGDIPFYFSREEWGTLDPAQRDLFWDIKRENSRNTTLGFGLKGQSEKSLLQEMVPVVPGQTGSDVTVSWSPEEAEAWESENRPRAALGPVVGARRGRPPTRRRQFRDLA

SEQ ID NO: 78 - protein, 116 aa, Synthetic construct
MVAVVRALQRALDGTSSQGMVTFEDTAVSLTWEEWERLDPARRDFCRESAQKDSGSTVPPSLESRVENKELIPMQQILEEAEPQGQLQEAFQGKRPLFSKCGSTHEDRVEKQSGDP

SEQ ID NO: 79 - protein, 113 aa, Synthetic construct
MNKSQGSVSFTDVTVDFTQEEWEQLDPSQRILYMDVMLENYSNLLSVEVWKADDQMERDHRNPDEQARQFLILKNQTPIEERGDLFGKALNLNTDFVSLRQVPYKYDLYEKTL

SEQ ID NO: 80 - protein, 108 aa, Synthetic construct
MAHGSVTFRDVAIDFSQEEWEFLDPAQRDLYRDVMWENYSNFISLGPSISKPDVITLLDEERKEPGMVVREGTRRYCPDLESRYRTNTLSPEKDIYEIYSFQWDIMER

SEQ ID NO: 81 - protein, 141 aa, Synthetic construct
MAAAVLRDSTSVPVTAEAKLMGFTQGCVTFEDVAIYFSQEEWGLLDEAQRLLYRDVMLENFALITALVCWHGMEDEETPEQSVSVEGVPQVRTPEASPSTQKIQSCDMCVPFLTDILHLTDLPGQELYLTGACAVFHQDQK

SEQ ID NO: 82 - protein, 133 aa, Synthetic construct
MLPPTAASQREGHTEGGELVNELLKSWLKGLVTFEDVAVEFTQEEWALLDPAQRTLYRDVMLENCRNLASLGNQVDKPRLISQLEQEDKVMTEERGILSGTCPDVENPFKAKGLTPKLHVFRKEQSRNMKMER

SEQ ID NO: 83 - protein, 107 aa, Synthetic construct
MAQESVMFSDVSVDFSQEEWECLNDDQRDLYRDVMLENYSNLVSMGHSISKPNVISYLEQGKEPWLADRELTRGQWPVLESRCETKKLFLKKEIYEIESTQWEIMEK

SEQ ID NO: 84 - protein, 114 aa, Synthetic construct
MPGAPGSLEMGPLTFRDVTIEFSLEEWQCLDTVQQNLYRDVMLENYRNLVFLGMAVFKPDLITCLKQGKEPWNMKRHEMVTKPPVMRSHFTQDLWPDQSTKDSFQEVILRTYAR

SEQ ID NO: 85 - protein, 95 aa, Synthetic construct
MAGSQFPDFKHLGTFLVFEELVTFEDVLVDFSPEELSSLSAAQRNLYREVMLENYRNLVSLGHQFSKPDIISRLEEEESYAMETDSRHTVICQGE

SEQ ID NO: 86 - protein, 78 aa, Synthetic construct
MPGPPRSLEMGLLTFRDVAIEFSLEEWQHLDIAQQNLYRNVMLENYRNLAFLGIAVSKPDLITCLEQGKEPWNMKRHE

SEQ ID NO: 87 - protein, 93 aa, Synthetic construct
MAPPLAPLPPRDPNGAGPEWREPGAVSFADVAVYFCREEWGCLRPAQRALYRDVMRETYGHLSALGIGGNKPALISWVEEEAELWGPAAQDPE

SEQ ID NO: 88 - protein, 100 aa, Synthetic construct
MGPPLAPRPAHVPGEAGPRRTRESRPGAVSFADVAVYFSPEEWECLRPAQRALYRDVMRETFGHLGALGFSVPKPAFISWVEGEVEAWSPEAQDPDGESS

SEQ ID NO: 89 - protein, 573 aa, Synthetic construct
MDAKSLTAWSRTLVTFKDVFVDFTREEWKLLDTAQQIVYRNVMLENYKNLVSLGYQLTKPDVILRLEKGEEPWLVEREIHQETHPDSETAFEIKSSVSSRSIFKDKQSCDIKMEGMARNDLWYLSLEEVWKCRDQLDKYQENPERHLRQVAFTQKKVLTQERVSESGKYGGNCLLPAQLVLREYFHKRDSHTKSLKHDLVLNGHQDSCASNSNECGQTFCQNIHLIQFARTHTGDKSYKCPDNDNSLTHGSSLGISKGIHREKPYECKECGKFFSWRSNLTRHQLIHTGEKPYECKECGKSFSRSSHLIGHQKTHTGEEPYECKECGKSFSWFSHLVTHQRTHTGDKLYTCNQCGKSFVHSSRLIRHQRTHTGEKPYECPECGKSFRQSTHLILHQRTHVRVRPYECNECGKSYSQRSHLVVHHRIHTGLKPFECKDCGKCFSRSSHLYSHQRTHTGEKPYECHDCGKSFSQSSALIVHQRIHTGEKPYECCQCGKAFIRKNDLIKHQRIHVGEETYKCNQCGIIFSQNSPFIVHQIAHTGEQFLTCNQCGTALVNTSNLIGYQTNHIRENAY

SEQ ID NO: 90 - protein, 191 aa, Synthetic construct
MGKKTKRTADSSSSEDEEEYVVEKVLDRRVVKGQVEYLLKWKGFSEEHNTWEPEKNLDCPELISEFMKKYKKMKEGENNKPREKSESNKRKSNFSNSADDIKSKKKREQSNDIARGFERGLEPEKIIGATDSCGDLMFLMKWKDTDEADLVLAKEANVKCPQIVIAFYEERLTWHAYPEDAENKEKETAKS

SEQ ID NO: 91 - protein, 228 aa, Synthetic construct
MTMGDKKSPTRPKRQAKPAADEGFWDCSVCTFRNSAEAFKCSICDVRKGTSTRKPRINSQLVAQQVAQQYATPPPPKKEKKEKVEKQDKEKPEKDKEISPSVTKKNTNKKTKPKSDILKDPPSEANSIQSANATTKTSETNHTSRPRLKNVDRSTAQQLAVTVGNVTVIITDFKEKTRSSSTSSSTVTSSAGSEQQNQSSSGSESTDKGSSRSSTPKGDMSAVNDESF

SEQ ID NO: 92 - protein, 180 aa, Synthetic construct
MGDKKSPTRPKRQPKPSSDEGYWDCSVCTFRNSAEAFKCMMCDVRKGTSTRKPRPVSQLVAQQVTQQFVPPTQSKKEKKDKVEKEKSEKETTSKKNSHKKTRPRLKNVDRSSAQHLEVTVGDLTVIITDFKEKTKSPPASSAASADQHSQSGSSSDNTERGMSRSSSPRGEASSLNGESH

SEQ ID NO: 93 - protein, 3065 aa, Synthetic construct
MEEKQQIILANQDGGTVAGAAPTFFVILKQPGNGKTDQGILVTNQDACALASSVSSPVKSKGKICLPADCTVGGITVTLDNNSMWNEFYHRSTEMILTKQGRRMFPYCRYWITGLDSNLKYILVMDISPVDNHRYKWNGRWWEPSGKAEPHVLGRVFIHPESPSTGHYWMHQPVSFYKLKLTNNTLDQEGHIILHSMHRYLPRLHLVPAEKAVEVIQLNGPGVHTFTFPQTEFFAVTAYQNIQITQLKIDYNPFAKGFRDDGLNNKPQRDGKQKNSSDQEGNNISSSSGHRVRLTEGQGSEIQPGDLDPLSRGHETSGKGLEKTSLNIKRDFLGFMDTDSALSEVPQLKQEISECLIASSFEDDSRVASPLDQNGSFNVVIKEEPLDDYDYELGECPEGVTVKQEETDEETDVYSNSDDDPILEKQLKRHNKVDNPEADHLSSKWLPSSPSGVAKAKMFKLDTGKMPVVYLEPCAVTRSTVKISELPDNMLSTSRKDKSSMLAELEYLPTYIENSNETAFCLGKESENGLRKHSPDLRVVQKYPLLKEPQWKYPDISDSISTERILDDSKDSVGDSLSGKEDLGRKRTTMLKIATAAKVVNANQNASPNVPGKRGRPRKLKLCKAGRPPKNTGKSLISTKNTPVSPGSTFPDVKPDLEDVDGVLFVSFESKEALDIHAVDGTTEESSSLQASTTNDSGYRARISQLEKELIEDLKTLRHKQVIHPGLQEVGLKLNSVDPTMSIDLKYLGVQLPLAPATSFPFWNLTGTNPASPDAGFPFVSRTGKTNDFTKIKGWRGKFHSASASRNEGGNSESSLKNRSAFCSDKLDEYLENEGKLMETSMGFSSNAPTSPVVYQLPTKSTSYVRTLDSVLKKQSTISPSTSYSLKPHSVPPVSRKAKSQNRQATFSGRTKSSYKSILPYPVSPKQKYSHVILGDKVTKNSSGIISENQANNFVVPTLDENIFPKQISLRQAQQQQQQQQGSRPPGLSKSQVKLMDLEDCALWEGKPRTYITEERADVSLTTLLTAQASLKTKPIHTIIRKRAPPCNNDFCRLGCVCSSLALEKRQPAHCRRPDCMFGCTCLKRKVVLVKGGSKTKHFQRKAAHRDPVFYDTLGEEAREEEEGIREEEEQLKEKKKRKKLEYTICETEPEQPVRHYPLWVKVEGEVDPEPVYIPTPSVIEPMKPLLLPQPEVLSPTVKGKLLTGIKSPRSYTPKPNPVIREEDKDPVYLYFESMMTCARVRVYERKKEDQRQPSSSSSPSPSFQQQTSCHSSPENHNNAKEPDSEQQPLKQLTCDLEDDSDKLQEKSWKSSCNEGESSSTSYMHQRSPGGPTKLIEIISDCNWEEDRNKILSILSQHINSNMPQSLKVGSFIIELASQRKSRGEKNPPVYSSRVKISMPSCQDQDDMAEKSGSETPDGPLSPGKMEDISPVQTDALDSVRERLHGGKGLPFYAGLSPAGKLVAYKRKPSSSTSGLIQVASNAKVAASRKPRTLLPSTSNSKMASSSGTATNRPGKNLKAFVPAKRPIAARPSPGGVFTQFVMSKVGALQQKIPGVSTPQTLAGTQKFSIRPSPVMVVTPVVSSEPVQVCSPVTAAVTTTTPQVFLENTTAVTPMTAISDVETKETTYSSGATTTGVVEVSETNTSTSVTSTQSTATVNLTKTTGITTPVASVAFPKSLVASPSTITLPVASTASTSLVVVTAAASSSMVTTPTSSLGSVPIILSGINGSPPVSQRPENAAQIPVATPQVSPNTVKRAGPRLLLIPVQQGSPTLRPVSNTQLQGHRMVLQPVRSPSGMNLFRHPNGQIVQLLPLHQLRGSNTQPNLQPVMFRNPGSVMGIRLPAPSKPSETPPSSTSSSAFSVMNPVIQAVGSSSAVNVITQAPSLLSSGASFVSQAGTLTLRISPPEPQSFASKTGSETKITYSSGGQPVGTASLIPLQSGSFALLQLPGQKPVPSSILQHVASLQMKRESQNPDQKDETNSIKREQETKKVLQSEGEAVDPEANVIKQNSGAATSEETLNDSLEDRGDHLDEECLPEEGCATVKPSEHSCITGSHTDQDYKDVNEEYGARNRKSSKEKVAVLEVRTISEKASNKTVQNLSKVQHQKLGDVKVEQQKGFDNPEENSSEFPVTFKEESKFELSGSKVMEQQSNLQPEAKEKECGDSLEKDRERWRKHLKGPLTRKCVGASQECKKEADEQLIKETKTCQENSDVFQQEQGISDLLGKSGITEDARVLKTECDSWSRISNPSAFSIVPRRAAKSSRGNGHFQGHLLLPGEQIQPKQEKKGGRSSADFTVLDLEEDDEDDNEKTDDSIDEIVDVVSDYQSEEVDDVEKNNCVEYIEDDEEHVDIETVEELSEEINVAHLKTTAAHTQSFKQPSCTHISADEKAAERSRKAPPIPLKLKPDYWSDKLQKEAEAFAYYRRTHTANERRRRGEMRDLFEKLKITLGLLHSSKVSKSLILTRAFSEIQGLTDQADKLIGQKNLLTRKRNILIRKVSSLSGKTEEVVLKKLEYIYAKQQALEAQKRKKKMGSDEFDISPRISKQQEGSSASSVDLGQMFINNRRGKPLILSRKKDQATENTSPLNTPHTSANLVMTPQGQLLTLKGPLFSGPVVAVSPDLLESDLKPQVAGSAVALPENDDLFMMPRIVNVTSLATEGGLVDMGGSKYPHEVPDSKPSDHLKDTVRNEDNSLEDKGRISSRGNRDGRVTLGPTQVFLANKDSGYPQIVDVSNMQKAQEFLPKKISGDMRGIQYKWKESESRGERVKSKDSSFHKLKMKDLKDSSIEMELRKVTSAIEEAALDSSELLTNMEDEDDTDETLTSLLNEIAFLNQQLNDDSVGLAELPSSMDTEFPGDARRAFISKVPPGSRATFQVEHLGTGLKELPDVQGESDSISPLLLHLEDDDFSENEKQLAEPASEPDVLKIVIDSEIKDSLLSNKKAIDGGKNTSGLPAEPESVSSPPTLHMKTGLENSNSTDTLWRPMPKLAPLGLKVANPSSDADGQSLKVMPCLAPIAAKVGSVGHKMNLTGNDQEGRESKVMPTLAPVVAKLGNSGASPSSAGK

SEQ ID NO: 94 - protein, 185 aa, Synthetic construct
MGKKQNKKKVEEVLEEEEEEYVVEKVLDRRVVKGKVEYLLKWKGFSDEDNTWEPEENLDCPDLIAEFLQSQKTAHETDKSEGGKRKADSDSEDKGEESKPKKKKEESEKPRGFARGLEPERIIGATDSSGELMFLMKWKNSDEADLVPAKEANVKCPQVVISFYEERLTWHSYPSEDDDKKDDKN

SEQ ID NO: 95 - protein, 660 aa, Synthetic construct
MLVCYSVLACEILWDLPCSIMGSPLGHFTWDKYLKETCSVPAPVHCFKQSYTPPSNEFKISMKLEAQDPRNTTSTCIATVVGLTGARLRLRLDGSDNKNDFWRLVDSAEIQPIGNCEKNGGMLQPPLGFRLNASSWPMFLLKTLNGAEMAPIRIFHKEPPSPSHNFFKMGMKLEAVDRKNPHFICPATIGEVRGSEVLVTFDGWRGAFDYWCRFDSRDIFPVGWCSLTGDNLQPPGTKVVIPKNPYPASDVNTEKPSIHSSTKTVLEHQPGQRGRKPGKKRGRTPKTLISHPISAPSKTAEPLKFPKKRGPKPGSKRKPRTLLNPPPASPTTSTPEPDTSTVPQDAATIPSSAMQAPTVCIYLNKNGSTGPHLDKKKVQQLPDHFGPARASVVLQQAVQACIDCAYHQKTVFSFLKQGHGGEVISAVFDREQHTLNLPAVNSITYVLRFLEKLCHNLRSDNLFGNQPFTQTHLSLTAIEYSHSHDRYLPGETFVLGNSLARSLEPHSDSMDSASNPTNLVSTSQRHRPLLSSCGLPPSTASAVRRLCSRGVLKGSNERRDMESFWKLNRSPGSDRYLESRDASRLSGRDPSSWTVEDVMQFVREADPQLGPHADLFRKHEIDGKALLLLRSDMMMKYMGLKLGPALKLSYHIDRLKQGKF

SEQ ID NO: 96 - protein, 860 aa, Synthetic construct
MEQVAEGARVTAVPVSAADSTEELAEVEEGVGVVGEDNDAAARGAEAFGDSEEDGEDVFEVEKILDMKTEGGKVLYKVRWKGYTSDDDTWEPEIHLEDCKEVLLEFRKKIAENKAKAVRKDIQRLSLNNDIFEANSDSDQQSETKEDTSPKKKKKKLRQREEKSPDDLKKKKAKAGKLKDKSKPDLESSLESLVFDLRTKKRISEAKEELKESKKPKKDEVKETKELKKVKKGEIRDLKTKTREDPKENRKTKKEKFVESQVESESSVLNDSPFPEDDSEGLHSDSREEKQNTKSARERAGQDMGLEHGFEKPLDSAMSAEEDTDVRGRRKKKTPRKAEDTRENRKLENKNAFLEKKTVPKKQRNQDRSKSAAELEKLMPVSAQTPKGRRLSGEERGLWSTDSAEEDKETKRNESKEKYQKRHDSDKEEKGRKEPKGLKTLKEIRNAFDLFKLTPEEKNDVSENNRKREEIPLDFKTIDDHKTKENKQSLKERRNTRDETDTWAYIAAEGDQEVLDSVCQADENSDGRQQILSLGMDLQLEWMKLEDFQKHLDGKDENFAATDAIPSNVLRDAVKNGDYITVKVALNSNEEYNLDQEDSSGMTLVMLAAAGGQDDLLRLLITKGAKVNGRQKNGTTALIHAAEKNFLTTVAILLEAGAFVNVQQSNGETALMKACKRGNSDIVRLVIECGADCNILSKHQNSALHFAKQSNNVLVYDLLKNHLETLSRVAEETIKDYFEARLALLEPVFPIACHRLCEGPDFSTDFNYKPPQNIPEGSGILLFIFHANFLGKEVIARLCGPCSVQAVVLNDKFQLPVFLDSHFVYSFSPVAGPNKLFIRLTEAPSAKVKLLIGAYRVQLQ

SEQ ID NO: 97 - protein, 103 aa, Synthetic construct
MSEEKPKEGVKTENDHINLKVAGQDGSVVQFKIKRHTPLSKLMKAYCERQGLSMRQIRFRFDGQPINETDTPAQLEMEDEDTIDVFQQQTGGVPESSLAGHSF

SEQ ID NO: 98 - protein, 4834 aa, Synthetic construct
MPSESFCLAAQARLDSKWLKTDIQLAFTRDGLCGLWNEMVKDGEIVYTGTESTQNGELPPRKDDSVEPSGTKKEDLNDKEKKDEEETPAPIYRAKSILDSWVWGKQPDVNELKECLSVLVKEQQALAVQSATTTLSALRLKQRLVILERYFIALNRTVFQENVKVKWKSSGISLPPVDKKSSRPAGKGVEGLARVGSRAALSFAFAFLRRAWRSGEDADLCSELLQESLDALRALPEASLFDESTVSSVWLEVVERATRFLRSVVTGDVHGTPATKGPGSIPLQDQHLALAILLELAVQRGTLSQMLSAILLLLQLWDSGAQETDNERSAQGTSAPLLPLLQRFQSIICRKDAPHSEGDMHLLSGPLSPNESFLRYLTLPQDNELAIDLRQTAVVVMAHLDRLATPCMPPLCSSPTSHKGSLQEVIGWGLIGWKYYANVIGPIQCEGLANLGVTQIACAEKRFLILSRNGRVYTQAYNSDTLAPQLVQGLASRNIVKIAAHSDGHHYLALAATGEVYSWGCGDGGRLGHGDTVPLEEPKVISAFSGKQAGKHVVHIACGSTYSAAITAEGELYTWGRGNYGRLGHGSSEDEAIPMLVAGLKGLKVIDVACGSGDAQTLAVTENGQVWSWGDGDYGKLGRGGSDGCKTPKLIEKLQDLDVVKVRCGSQFSIALTKDGQVYSWGKGDNQRLGHGTEEHVRYPKLLEGLQGKKVIDVAAGSTHCLALTEDSEVHSWGSNDQCQHFDTLRVTKPEPAALPGLDTKHIVGIACGPAQSFAWSSCSEWSIGLRVPFVVDICSMTFEQLDLLLRQVSEGMDGSADWPPPQEKECVAVATLNLLRLQLHAAISHQVDPEFLGLGLGSILLNSLKQTVVTLASSAGVLSTVQSAAQAVLQSGWSVLLPTAEERARALSALLPCAVSGNEVNISPGRRFMIDLLVGSLMADGGLESALHAAITAEIQDIEAKKEAQKEKEIDEQEANASTFHRSRTPLDKDLINTGICESSGKQCLPLVQLIQQLLRNIASQTVARLKDVARRISSCLDFEQHSRERSASLDLLLRFQRLLISKLYPGESIGQTSDISSPELMGVGSLLKKYTALLCTHIGDILPVAASIASTSWRHFAEVAYIVEGDFTGVLLPELVVSIVLLLSKNAGLMQEAGAVPLLGGLLEHLDRFNHLAPGKERDDHEELAWPGIMESFFTGQNCRNNEEVTLIRKADLENHNKDGGFWTVIDGKVYDIKDFQTQSLTGNSILAQFAGEDPVVALEAALQFEDTRESMHAFCVGQYLEPDQEIVTIPDLGSLSSPLIDTERNLGLLLGLHASYLAMSTPLSPVEIECAKWLQSSIFSGGLQTSQIHYSYNEEKDEDHCSSPGGTPASKSRLCSHRRALGDHSQAFLQAIADNNIQDHNVKDFLCQIERYCRQCHLTTPIMFPPEHPVEEVGRLLLCCLLKHEDLGHVALSLVHAGALGIEQVKHRTLPKSVVDVCRVVYQAKCSLIKTHQEQGRSYKEVCAPVIERLRFLFNELRPAVCNDLSIMSKFKLLSSLPRWRRIAQKIIRERRKKRVPKKPESTDDEEKIGNEESDLEEACILPHSPINVDKRPIAIKSPKDKWQPLLSTVTGVHKYKWLKQNVQGLYPQSPLLSTIAEFALKEEPVDVEKMRKCLLKQLERAEVRLEGIDTILKLASKNFLLPSVQYAMFCGWQRLIPEGIDIGEPLTDCLKDVDLIPPFNRMLLEVTFGKLYAWAVQNIRNVLMDASAKFKELGIQPVPLQTITNENPSGPSLGTIPQARFLLVMLSMLTLQHGANNLDLLLNSGMLALTQTALRLIGPSCDNVEEDMNASAQGASATVLEETRKETAPVQLPVSGPELAAMMKIGTRVMRGVDWKWGDQDGPPPGLGRVIGELGEDGWIRVQWDTGSTNSYRMGKEGKYDLKLAELPAAAQPSAEDSDTEDDSEAEQTERNIHPTAMMFTSTINLLQTLCLSAGVHAEIMQSEATKTLCGLLRMLVESGTTDKTSSPNRLVYREQHRSWCTLGFVRSIALTPQVCGALSSPQWITLLMKVVEGHAPFTATSLQRQILAVHLLQAVLPSWDKTERARDMKCLVEKLFDFLGSLLTTCSSDVPLLRESTLRRRRVRPQASLTATHSSTLAEEVVALLRTLHSLTQWNGLINKYINSQLRSITHSFVGRPSEGAQLEDYFPDSENPEVGGLMAVLAVIGGIDGRLRLGGQVMHDEFGEGTVTRITPKGKITVQFSDMRTCRVCPLNQLKPLPAVAFNVNNLPFTEPMLSVWAQLVNLAGSKLEKHKIKKSTKQAFAGQVDLDLLRCQQLKLYILKAGRALLSHQDKLRQILSQPAVQETGTVHTDDGAVVSPDLGDMSPEGPQPPMILLQQLLASATQPSPVKAIFDKQELEAAALAVCQCLAVESTHPSSPGFEDCSSSEATTPVAVQHIRPARVKRRKQSPVPALPIVVQLMEMGFSRRNIEFALKSLTGASGNASSLPGVEALVGWLLDHSDIQVTELSDADTVSDEYSDEEVVEDVDDAAYSMSTGAVVTESQTYKKRADFLSNDDYAVYVRENIQVGMMVRCCRAYEEVCEGDVGKVIKLDRDGLHDLNVQCDWQQKGGTYWVRYIHVELIGYPPPSSSSHIKIGDKVRVKASVTTPKYKWGSVTHQSVGVVKAFSANGKDIIVDFPQQSHWTGLLSEMELVPSIHPGVTCDGCQMFPINGSRFKCRNCDDFDFCETCFKTKKHNTRHTFGRINEPGQSAVFCGRSGKQLKRCHSSQPGMLLDSWSRMVKSLNVSSSVNQASRLIDGSEPCWQSSGSQGKHWIRLEIFPDVLVHRLKMIVDPADSSYMPSLVVVSGGNSLNNLIELKTININPSDTTVPLLNDCTEYHRYIEIAIKQCRSSGIDCKIHGLILLGRIRAEEEDLAAVPFLASDNEEEEDEKGNSGSLIRKKAAGLESAATIRTKVFVWGLNDKDQLGGLKGSKIKVPSFSETLSALNVVQVAGGSKSLFAVTVEGKVYACGEATNGRLGLGISSGTVPIPRQITALSSYVVKKVAVHSGGRHATALTVDGKVFSWGEGDDGKLGHFSRMNCDKPRLIEALKTKRIRDIACGSSHSAALTSSGELYTWGLGEYGRLGHGDNTTQLKPKMVKVLLGHRVIQVACGSRDAQTLALTDEGLVFSWGDGDFGKLGRGGSEGCNIPQNIERLNGQGVCQIECGAQFSLALTKSGVVWTWGKGDYFRLGHGSDVHVRKPQVVEGLRGKKIVHVAVGALHCLAVTDSGQVYAWGDNDHGQQGNGTTTVNRKPTLVQGLEGQKITRVACGSSHSVAWTTVDVATPSVHEPVLFQTARDPLGASYLGVPSDADSSAASNKISGASNSKPNRPSLAKILLSLDGNLAKQQALSHILTALQIMYARDAVVGALMPAAMIAPVECPSFSSAAPSDASAMASPMNGEECMLAVDIEDRLSPNPWQEKREIVSSEDAVTPSAVTPSAPSASARPFIPVTDDLGAASIIAETMTKTKEDVESQNKAAGPEPQALDEFTSLLIADDTRVVVDLLKLSVCSRAGDRGRDVLSAVLSGMGTAYPQVADMLLELCVTELEDVATDSQSGRLSSQPVVVESSHPYTDDTSTSGTVKIPGAEGLRVEFDRQCSTERRHDPLTVMDGVNRIVSVRSGREWSDWSSELRIPGDELKWKFISDGSVNGWGWRFTVYPIMPAAGPKELLSDRCVLSCPSMDLVTCLLDFRLNLASNRSIVPRLAASLAACAQLSALAASHRMWALQRLRKLLTTEFGQSININRLLGENDGETRALSFTGSALAALVKGLPEALQRQFEYEDPIVRGGKQLLHSPFFKVLVALACDLELDTLPCCAETHKWAWFRRYCMASRVAVALDKRTPLPRLFLDEVAKKIRELMADSENMDVLHESHDIFKREQDEQLVQWMNRRPDDWTLSAGGSGTIYGWGHNHRGQLGGIEGAKVKVPTPCEALATLRPVQLIGGEQTLFAVTADGKLYATGYGAGGRLGIGGTESVSTPTLLESIQHVFIKKVAVNSGGKHCLALSSEGEVYSWGEAEDGKLGHGNRSPCDRPRVIESLRGIEVVDVAAGGAHSACVTAAGDLYTWGKGRYGRLGHSDSEDQLKPKLVEALQGHRVVDIACGSGDAQTLCLTDDDTVWSWGDGDYGKLGRGGSDGCKVPMKIDSLTGLGVVKVECGSQFSVALTKSGAVYTWGKGDYHRLGHGSDDHVRRPRQVQGLQGKKVIAIATGSLHCVCCTEDGEVYTWGDNDEGQLGDGTTNAIQRPRLVAALQGKKVNRVACGSAHTLAWSTSKPASAGKLPAQVPMEYNHLQEIPIIALRNRLLLLHHLSELFCPCIPMFDLEGSLDETGLGPSVGFDTLRGILISQGKEAAFRKVVQATMVRDRQHGPVVELNRIQVKRSRSKGGLAGPDGTKSVFGQMCAKMSSFGPDSLLLPHRVWKVKFVGESVDDCGGGYSESIAEICEELQNGLTPLLIVTPNGRDESGANRDCYLLSPAARAPVHSSMFRFLGVLLGIAIRTGSPLSLNLAEPVWKQLAGMSLTIADLSEVDKDFIPGLMYIRDNEATSEEFEAMSLPFTVPSASGQDIQLSSKHTHITLDNRAEYVRLAINYRLHEFDEQVAAVREGMARVVPVPLLSLFTGYELETMVCGSPDIPLHLLKSVATYKGIEPSASLIQWFWEVMESFSNTERSLFLRFVWGRTRLPRTIADFRGRDFVIQVLDKYNPPDHFLPESYTCFFLLKLPRYSCKQVLEEKLKYAIHFCKSIDTDDYARIALTGEPAADDSSDDSDNEDVDSFASDSTQDYLTGH

SEQ ID NO: 99 - protein, 593 aa, Synthetic construct
MAEMGSKGVTAGKIASNVQKKLTRAQEKVLQKLGKADETKDEQFEQCVQNFNKQLTEGTRLQKDLRTYLASVKAMHEASKKLNECLQEVYEPDWPGRDEANKIAENNDLLWMDYHQKLVDQALLTMDTYLGQFPDIKSRIAKRGRKLVDYDSARHHYESLQTAKKKDEAKIAKPVSLLEKAAPQWCQGKLQAHLVAQTNLLRNQAEEELIKAQKVFEEMNVDLQEELPSLWNSRVGFYVNTFQSIAGLEENFHKEMSKLNQNLNDVLVGLEKQHGSNTFTVKAQPSDNAPAKGNKSPSPPDGSPAATPEIRVNHEPEPAGGATPGATLPKSPSQLRKGPPVPPPPKHTPSKEVKQEQILSLFEDTFVPEISVTTPSQFEAPGPFSEQASLLDLDFDPLPPVTSPVKAPTPSGQSIPWDLWEPTESPAGSLPSGEPSAAEGTFAVSWPSQTAEPGPAQPAEASEVAGGTQPAAGAQEPGETAASEAASSSLPAVVVETFPATVNGTVEGGSGAGRLDLPPGFMFKVQAQHDYTATDTDELQLKAGDVVLVIPFQNPEEQDEGWLMGVKESDWNQHKELEKCRGVFPENFTERVP

SEQ ID NO: 100 - protein, 344 aa, Synthetic construct
MHRTTRIKITELNPHLMCALCGGYFIDATTIVECLHSFCKTCIVRYLETNKYCPMCDVQVHKTRPLLSIRSDKTLQDIVYKLVPGLFKDEMKRRRDFYAAYPLTEVPNGSNEDRGEVLEQEKGALSDDEIVSLSIEFYEGARDRDEKKGPLENGDGDKEKTGVRFLRCPAAMTVMHLAKFLRNKMDVPSKYKVEVLYEDEPLKEYYTLMDIAYIYPWRRNGPLPLKYRVQPACKRLTLATVPTPSEGTNTSGASECESVSDKAPSPATLPATSSSLPSPATPSHGSPSSHGPPATHPTSPTPPSTASGATTAANGGSLNCLQTPSSTSRGRKMTVNGAPVPPLT

SEQ ID NO: 101 - protein, 526 aa, Synthetic construct
MDVRFYPPPAQPAAAPDAPCLGPSPCLDPYYCNKFDGENMYMSMTEPSQDYVPASQSYPGPSLESEDFNIPPITPPSLPDHSLVHLNEVESGYHSLCHPMNHNGLLPFHPQNMDLPEITVSNMLGQDGTLLSNSISVMPDIRNPEGTQYSSHPQMAAMRPRGQPADIRQQPGMMPHGQLTTINQSQLSAQLGLNMGGSNVPHNSPSPPGSKSATPSPSSSVHEDEGDDTSKINGGEKRPASDMGKKPKTPKKKKKKDPNEPQKPVSAYALFFRDTQAAIKGQNPNATFGEVSKIVASMWDGLGEEQKQVYKKKTEAAKKEYLKQLAAYRASLVSKSYSEPVDVKTSQPPQLINSKPSVFHGPSQAHSALYLSSHYHQQPGMNPHLTAMHPSLPRNIAPKPNNQMPVTVSIANMAVSPPPPLQISPPLHQHLNMQQHQPLTMQQPLGNQLPMQVQSALHSPTMQQGFTLQPDYQTIINPTSTAAQVVTQAMEYVRSGCRNPPPQPVDWNNDYCSSGGMQRDKALYLT

SEQ ID NO: 102 - protein, 472 aa, Synthetic construct
MLGTVKMEGHETSDWNSYYADTQEAYSSVPVSNMNSGLGSMNSMNTYMTMNTMTTSGNMTPASFNMSYANPGLGAGLSPGAVAGMPGGSAGAMNSMTAAGVTAMGTALSPSGMGAMGAQQAASMNGLGPYAAAMNPCMSPMAYAPSNLGRSRAGGGGDAKTFKRSYPHAKPPYSYISLITMAIQQAPSKMLTLSEIYQWIMDLFPYYRQNQQRWQNSIRHSLSFNDCFVKVARSPDKPGKGSYWTLHPDSGNMFENGCYLRRQKRFKCEKQPGAGGGGGSGSGGSGAKGGPESRKDPSGASNPSADSPLHRGVHGKTGQLEGAPAPGPAASPQTLDHSGATATGGASELKTPASSTAPPISSGPGALASVPASHPAHGLAPHESQLHLKGDPHYSFNHPFSINNLMSSSEQQHKLDFKAYEQALQYSPYGSTLPASLPLGSASVTTRSPIEPSALEPAYYQGVYSRPVLNTS

SEQ ID NO: 103 - protein, 457 aa, Synthetic construct
MLGAVKMEGHEPSDWSSYYAEPEGYSSVSNMNAGLGMNGMNTYMSMSAAAMGSGSGNMSAGSMNMSSYVGAGMSPSLAGMSPGAGAMAGMGGSAGAAGVAGMGPHLSPSLSPLGGQAAGAMGGLAPYANMNSMSPMYGQAGLSRARDPKTYRRSYTHAKPPYSYISLITMAIQQSPNKMLTLSEIYQWIMDLFPFYRQNQQRWQNSIRHSLSFNDCFLKVPRSPDKPGKGSFWTLHPDSGNMFENGCYLRRQKRFKCEKQLALKEAAGAAGSGKKAAAGAQASQAQLGEAAGPASETPAGTESPHSSASPCQEHKRGGLGELKGTPAAALSPPEPAPSPGQQQQAAAHLLGPPHHPGLPPEAHLKPEHHYAFNHPFSINNLMSSEQQHHHSHHHHQPHKMDLKAYEQVMHYPGYGSPMPGSLAMGPVTNKTGLDASPLAADTSYYQGVYSRPIMNSS

SEQ ID NO: 104 - protein, 584 aa, Synthetic construct
MASVQASRRQWCYLCDLPKMPWAMVWDFSEAVCRGCVNFEGADRIELLIDAARQLKRSHVLPEGRSPGPPALKHPATKDLAAAAAQGPQLPPPQAQPQPSGTGGGVSGQDRYDRATSSGRLPLPSPALEYTLGSRLANGLGREEAVAEGARRALLGSMPGLMPPGLLAAAVSGLGSRGLTLAPGLSPARPLFGSDFEKEKQQRNADCLAELNEAMRGRAEEWHGRPKAVREQLLALSACAPFNVRFKKDHGLVGRVFAFDATARPPGYEFELKLFTEYPCGSGNVYAGVLAVARQMFHDALREPGKALASSGFKYLEYERRHGSGEWRQLGELLTDGVRSFREPAPAEALPQQYPEPAPAALCGPPPRAPSRNLAPTPRRRKASPEPEGEAAGKMTTEEQQQRHWVAPGGPYSAETPGVPSPIAALKNVAEALGHSPKDPGGGGGPVRAGGASPAASSTAQPPTQHRLVARNGEAEVSPTAGAEAVSGGGSGTGATPGAPLCCTLCRERLEDTHFVQCPSVPGHKFCFPCSREFIKAQGPAGEVYCPSGDKCPLVGSSVPWAFMQGEIATILAGDIKVKKERDP

SEQ ID NO: 105 - protein, 587 aa, Synthetic construct
MAAAVAVAAASRRQSCYLCDLPRMPWAMIWDFTEPVCRGCVNYEGADRVEFVIETARQLKRAHGCFPEGRSPPGAAASAAAKPPPLSAKDILLQQQQQLGHGGPEAAPRAPQALERYPLAAAAERPPRLGSDFGSSRPAASLAQPPTPQPPPVNGILVPNGFSKLEEPPELNRQSPNPRRGHAVPPTLVPLMNGSATPLPTALGLGGRAAASLAAVSGTAAASLGSAQPTDLGAHKRPASVSSSAAVEHEQREAAAKEKQPPPPAHRGPADSLSTAAGAAELSAEGAGKSRGSGEQDWVNRPKTVRDTLLALHQHGHSGPFESKFKKEPALTAGRLLGFEANGANGSKAVARTARKRKPSPEPEGEVGPPKINGEAQPWLSTSTEGLKIPMTPTSSFVSPPPPTASPHSNRTTPPEAAQNGQSPMAALILVADNAGGSHASKDANQVHSTTRRNSNSPPSPSSMNQRRLGPREVGGQGAGNTGGLEPVHPASLPDSSLATSAPLCCTLCHERLEDTHFVQCPSVPSHKFCFPCSRQSIKQQGASGEVYCPSGEKCPLVGSNVPWAFMQGEIATILAGDVKVKKERDS

SEQ ID NO: 106 - protein, 796 aa, Synthetic construct
MSAAQVSSSRRQSCYLCDLPRMPWAMIWDFSEPVCRGCVNYEGADRIEFVIETARQLKRAHGCFQDGRSPGPPPPVGVKTVALSAKEAAAAAAAAAAAAAAAQQQQQQQQQQQQQQQQQQQQQQQQQLNHVDGSSKPAVLAAPSGLERYGLSAAAAAAAAAAAAVEQRSRFEYPPPPVSLGSSSHTARLPNGLGGPNGFPKPTPEEGPPELNRQSPNSSSAAASVASRRGTHGGLVTGLPNPGGGGGPQLTVPPNLLPQTLLNGPASAAVLPPPPPHALGSRGPPTPAPPGAPGGPACLGGTPGVSATSSSASSSTSSSVAEVGVGAGGKRPGSVSSTDQERELKEKQRNAEALAELSESLRNRAEEWASKPKMVRDTLLTLAGCTPYEVRFKKDHSLLGRVFAFDAVSKPGMDYELKLFIEYPTGSGNVYSSASGVAKQMYQDCMKDFGRGLSSGFKYLEYEKKHGSGDWRLLGDLLPEAVRFFKEGVPGADMLPQPYLDASCPMLPTALVSLSRAPSAPPGTGALPPAAPSGRGAAASLRKRKASPEPPDSAEGALKLGEEQQRQQWMANQSEALKLTMSAGGFAAPGHAAGGPPPPPPPLGPHSNRTTPPESAPQNGPSPMAALMSVADTLGTAHSPKDGSSVHSTTASARRNSSSPVSPASVPGQRRLASRNGDLNLQVAPPPPSAHPGMDQVHPQNIPDSPMANSGPLCCTICHERLEDTHFVQCPSVPSHKFCFPCSRESIKAQGATGEVYCPSGEKCPLVGSNVPWAFMQGEIATILAGDVKVKKERDP

SEQ ID NO: 107 - protein, 388 aa, Synthetic construct
MTASVLLHPRWIEPTVMFLYDNGGGLVADELNKNMEGAAAAAAAAAAAAAAGAGGGGFPHPAAAAAGGNFSVAAAAAAAAAAAANQCRNLMAHPAPLAPGAASAYSSAPGEAPPSAAAAAAAAAAAAAAAAAASSSGGPGPAGPAGAEAAKQCSPCSAAAQSSSGPAALPYGYFGSGYYPCARMGPHPNAIKSCAQPASAAAAAAFADKYMDTAGPAAEEFSSRAKEFAFYHQGYAAGPYHHHQPMPGYLDMPVVPGLGGPGESRHEPLGLPMESYQPWALPNGWNGQMYCPKEQAQPPHLWKSTLPDVVSHPSDASSYRRGRKKRVPYTKVQLKELEREYATNKFITKDKRRRISATTNLSERQVTIWFQNRRVKEKKVINKLKTTS

SEQ ID NO: 108 - protein, 284 aa, Synthetic construct
MEPGNYATLDGAKDIEGLLGAGGGRNLVAHSPLTSHPAAPTLMPAVNYAPLDLPGSAEPPKQCHPCPGVPQGTSPAPVPYGYFGGGYYSCRVSRSSLKPCAQAATLAAYPAETPTAGEEYPSRPTEFAFYPGYPGTYQPMASYLDVSVVQTLGAPGEPRHDSLLPVDSYQSWALAGGWNSQMCCQGEQNPPGPFWKAAFADSSGQHPPDACAFRRGRKKRIPYSKGQLRELEREYAANKFITKDKRRKISAATSLSERQITIWFQNRRVKEKKVLAKVKNSATP

SEQ ID NO: 109 - protein, 330 aa, Synthetic construct
MTTSLLLHPRWPESLMYVYEDSAAESGIGGGGGGGGGGTGGAGGGCSGASPGKAPSMDGLGSSCPASHCRDLLPHPVLGRPPAPLGAPQGAVYTDIPAPEAARQCAPPPAPPTSSSATLGYGYPFGGSYYGCRLSHNVNLQQKPCAYHPGDKYPEPSGALPGDDLSSRAKEFAFYPSFASSYQAMPGYLDVSVVPGISGHPEPRHDALIPVEGYQHWALSNGWDSQVYCSKEQSQSAHLWKSPFPDVVPLQPEVSSYRRGRKKRVPYTKVQLKELEKEYAASKFITKEKRRRISATTNLSERQVTIWFQNRRVKEKKVVSKSKAPHLHST

SEQ ID NO: 110 - protein, 313 aa, Synthetic construct
MDFDERGPCSSNMYLPSCTYYVSGPDFSSLPSFLPQTPSSRPMTYSYSSNLPQVQPVREVTFREYAIEPATKWHPRGNLAHCYSAEELVHRDCLQAPSAAGVPGDVLAKSSANVYHHPTPAVSSNFYSTVGRNGVLPQAFDQFFETAYGTPENLASSDYPGDKSAEKGPPAATATSAAAAAAATGAPATSSSDSGGGGGCRETAAAAEEKERRRRPESSSSPESSSGHTEDKAGGSSGQRTRKKRCPYTKYQIRELEREFFFSVYINKEKRLQLSRMLNLTDRQVKIWFQNRRMKEKKINRDRLQYYSANPLL

SEQ ID NO: 111 - protein, 304 aa, Synthetic construct
MFNSVNLGNFCSPSRKERGADFGERGSCASNLYLPSCTYYMPEFSTVSSFLPQAPSRQISYPYSAQVPPVREVSYGLEPSGKWHHRNSYSSCYAAADELMHRECLPPSTVTEILMKNEGSYGGHHHPSAPHATPAGFYSSVNKNSVLPQAFDRFFDNAYCGGGDPPAEPPCSGKGEAKGEPEAPPASGLASRAEAGAEAEAEEENTNPSSSGSAHSVAKEPAKGAAPNAPRTRKKRCPYSKFQIRELEREFFFNVYINKEKRLQLSRMLNLTDRQVKIWFQNRRMKEKKLSRDRLQYFSGNPLL

SEQ ID NO: 112 - protein, 342 aa, Synthetic construct
MTCPRNVTPNSYAEPLAAPGGGERYSRSAGMYMQSGSDFNCGVMRGCGLAPSLSKRDEGSSPSLALNTYPSYLSQLDSWGDPKAAYRLEQPVGRPLSSCSYPPSVKEENVCCMYSAEKRAKSGPEAALYSHPLPESCLGEHEVPVPSYYRASPSYSALDKTPHCSGANDFEAPFEQRASLNPRAEHLESPQLGGKVSFPETPKSDSQTPSPNEIKTEQSLAGPKGSPSESEKERAKAADSSPDTSDNEAKEEIKAENTTGNWLTAKSGRKKRCPYTKHQTLELEKEFLFNMYLTRERRLEISKTINLTDRQVKIWFQNRRMKLKKMNRENRIRELTSNFNFT

SEQ ID NO: 113 - protein, 410 aa, Synthetic construct
MSARKGYLLPSPNYPTTMSCSESPAANSFLVDSLISSGRGEAGGGGGGAGGGGGGGYYAHGGVYLPPAADLPYGLQSCGLFPTLGGKRNEAASPGSGGGGGGLGPGAHGYGPSPIDLWLDAPRSCRMEPPDGPPPPPQQQPPPPPQPPQPAPQATSCSFAQNIKEESSYCLYDSADKCPKVSATAAELAPFPRGPPPDGCALGTSSGVPVPGYFRLSQAYGTAKGYGSGGGGAQQLGAGPFPAQPPGRGFDLPPALASGSADAARKERALDSPPPPTLACGSGGGSQGDEEAHASSSAAEELSPAPSESSKASPEKDSLGNSKGENAANWLTAKSGRKKRCPYTKHQTLELEKEFLFNMYLTRERRLEISRSVHLTDRQVKIWFQNRRMKLKKMNRENRIRELTANFNFS

SEQ ID NO: 114 - protein, 250 aa, Synthetic construct
MSISGTLSSYYVDSIISHESEDAPPAKFPSGQYASSRQPGHAEHLEFPSCSFQPKAPVFGASWAPLSPHASGSLPSVYHPYIQPQGVPPAESRYLRTWLEPAPRGEAAPGQGQAAVKAEPLLGAPGELLKQGTPEYSLETSAGREAVLSNQRPGYGDNKICEGSEDKERPDQTNPSANWLHARSSRKKRCPYTKYQTLELEKEFLFNMYLTRDRRHEVARLLNLSERQVKIWFQNRRMKMKKMNKEQGKE

SEQ ID NO: 115 - protein, 272 aa, Synthetic construct
MATTGALGNYYVDSFLLGADAADELSVGRYAPGTLGQPPRQAATLAEHPDFSPCSFQSKATVFGASWNPVHAAGANAVPAAVYHHHHHHPYVHPQAPVAAAAPDGRYMRSWLEPTPGALSFAGLPSSRPYGIKPEPLSARRGDCPTLDTHTLSLTDYACGSPPVDREKQPSEGAFSENNAENESGGDKPPIDPNNPAANWLHARSTRKKRCPYTKHQTLELEKEFLFNMYLTRDRRYEVARLLNLTERQVKIWFQNRRMKMKKINKDRAKDE

SEQ ID NO: 116 - protein, 80 aa, Homo sapiens
NKKLEAVGTGIEPKAMSQGLVTFGDVAVDFSQEEWEWLNPIQRNLYRKVMLENYRNLASLGLCVSKPDVISSLEQGKEPW

SEQ ID NO: 117 - protein, 80 aa, Homo sapiens
KMKKFQIPVSFQDLTVNFTQEEWQQLDPAQRLLYRDVMLENYSNLVSVGYHVSKPDVIFKLEQGEEPWIVEEFSNQNYPD

SEQ ID NO: 118 - protein, 80 aa, Homo sapiens
CSQESALSEEEEDTTRPLETVTFKDVAVDLTQEEWEQMKPAQRNLYRDVMLENYSNLVTVGCQVTKPDVIFKLEQEEEPW

SEQ ID NO: 119 - protein, 80 aa, Homo sapiens
ITSQGSVSFRDVTVGFTQEEWQHLDPAQRTLYRDVMLENYSHLVSVGYCIPKPEVILKLEKGEEPWILEEKFPSQSHLEL

SEQ ID NO: 120 - protein, 80 aa, Homo sapiens
PQVTFNDVAIDFTHEEWGWLSSAQRDLYKDVMVQNYENLVSVAGLSVTKPYVITLLEDGKEPWMMEKKLSKGMIPDWESR

SEQ ID NO: 121 - protein, 80 aa, Homo sapiens
PLRFSTLFQEQQKMNISQASVSFKDVTIEFTQEEWQQMAPVQKNLYRDVMLENYSNLVSVGYCCFKPEVIFKLEQGEEPW

SEQ ID NO: 122 - protein, 80 aa, Homo sapiens
QDPSAEGLSEEVPVVFEELPVVFEDVAVYFTREEWGMLDKRQKELYRDVMRMNYELLASLGPAAAKPDLISKLERRAAPW

SEQ ID NO: 123 - protein, 80 aa, Homo sapiens
SQGSVTFRDVAIDFSQEEWKWLQPAQRDLYRCVMLENYGHLVSLGLSISKPDVVSLLEQGKEPWLGKREVKRDLFSVSES

SEQ ID NO: 124 - protein, 80 aa, Homo sapiens
GSLTFRDVAIEFSLEEWQCLDTAQQNLYRNVMLENYRNLVFLGIAAFKPDLIIFLEEGKESWNMKRHEMVEESPVICSHF

SEQ ID NO: 125 - protein, 80 aa, Homo sapiens
NKSQEQVSFKDVCVDFTQEEWYLLDPAQKILYRDVILENYSNLVSVGYCITKPEVIFKIEQGEEPWILEKGFPSQCHPER

SEQ ID NO: 126 - protein, 80 aa, Homo sapiens
PHLLVTFRDVAIDFSQEEWECLDPAQRDLYRDVMLENYSNLISLDLESSCVTKKLSPEKEIYEMESLQWENMGKRINHHL

SEQ ID NO: 127 - protein, 80 aa, Homo sapiens
EEERKTAELQKNRIQDSVVFEDVAVDFTQEEWALLDLAQRNLYRDVMLENFQNLASLGYPLHTPHLISQWEQEEDLQTVK

SEQ ID NO: 128 - protein, 80 aa, Homo sapiens
GLLTFRDVAIEFSLEEWQCLDTAQKNLYRNVMLENYRNLAFLGIAVSKPDLIICLEKEKEPWNMKRDEMVDEPPGICPHF

SEQ ID NO: 129 - protein, 80 aa, Homo sapiens
RAPTQVTVSPETHMDLTKGCVTFEDIAIYFSQDEWGLLDEAQRLLYLEVMLENFALVASLGCGHGTEDEETPSDQNVSVG

SEQ ID NO: 130 - protein, 80 aa, Homo sapiens
AAVSPTTRCQESVTFEDVAVVFTDEEWSRLVPIQRDLYKEVMLENYNSIVSLGLPVPQPDVIFQLKRGDKPWMVDLHGSE

SEQ ID NO: 131 - protein, 80 aa, Homo sapiens
HSLEKVTFEDVAIDFTQEEWDMMDTSKRKLYRDVMLENISHLVSLGYQISKSYIILQLEQGKELWREGRVFLQDQNPDRE

SEQ ID NO: 132 - protein, 80 aa, Homo sapiens
DSVSFEDVAVNFTLEEWALLDSSQKKLYEDVMQETFKNLVCLGKKWEDQDIEDDHRNQGKNRRCHMVERLCESRRGSKCG

SEQ ID NO: 133 - protein, 80 aa, Homo sapiens
NVEVVKVMPQDLVTFKDVAIDFSQEEWQWMNPAQKRLYRSMMLENYQSLVSLGLCISKPYVISLLEQGREPWEMTSEMTR

SEQ ID NO: 134 - protein, 80 aa, Homo sapiens
TQPDEDLHLQAEETQLVKESVTFKDVAIDFTLEEWRLMDPTQRNLHKDVMLENYRNLVSLGLAVSKPDMISHLENGKGPW

SEQ ID NO: 135 - protein, 80 aa, Homo sapiens
TMLQESFSFDDLSVDFTQKEWQLLDPSQKNLYKDVMLENYSSLVSLGYEVMKPDVIFKLEQGEEPWVGDGEIPSSDSPEV

SEQ ID NO: 136 - protein, 80 aa, Homo sapiens
EVVTFGDVAVHFSREEWQCLDPGQRALYREVMLENHSSVAGLAGFLVFKPELISRLEQGEEPWVLDLQGAEGTEAPRTSK

SEQ ID NO: 137 - protein, 80 aa, Homo sapiens
RNAEEERMIAVFLTTWLQEPMTFKDVAVEFTQEEWMMLDSAQRSLYRDVMLENYRNLTSVEYQLYRLTVISPLDQEEIRN

SEQ ID NO: 138 - protein, 80 aa, Homo sapiens
GPQGARRQAFLAFGDVTVDFTQKEWRLLSPAQRALYREVTLENYSHLVSLGILHSKPELIRRLEQGEVPWGEERRRRPGP

SEQ ID NO: 139 - protein, 80 aa, Homo sapiens
HSLKKLTFEDVAIDFTQEEWAMMDTSKRKLYRDVMLENISHLVSLGYQISKSYIILQLEQGKELWREGRVFLQDQNPNRE

SEQ ID NO: 140 - protein, 80 aa, Homo sapiens
MPEVEFPDQFFTVLTMDHELVTLRDVVINFSQEEWEYLDSAQRNLYWDVMMENYSNLLSLDLESRNETKHLSVGKDIIQN

SEQ ID NO: 141 - protein, 80 aa, Homo sapiens
PGAPGSLEMGPLTFRDVTIEFSLEEWQCLDTVQQNLYRDVMLENYRNLVFLGMAVFKPDLITCLKQGKEPWNMKRHEMVT

SEQ ID NO: 142 - protein, 80 aa, Homo sapiens
RDPAQVPVAADLLTDHEEGYVTFEDVAVYFSQEEWRLLDDAQRLLYRNVMLENFTLLASLGLASSKTHEITQLESWEEPF

SEQ ID NO: 143 - protein, 80 aa, Homo sapiens
HSLKKVTFEDVAIDFTQEEWAMMDTSKRKLYRDVMLENISHLVSLGYQISKSYIILQLEQGKELWREGREFLQDQNPDRE

SEQ ID NO: 144 - protein, 80 aa, Homo sapiens
TKSKEAVTFKDVAVVFSEEELQLLDLAQRKLYRDVMLENFRNVVSVGHQSTPDGLPQLEREEKLWMMKMATQRDNSSGAK

SEQ ID NO: 145 - protein, 80 aa, Homo sapiens
SQVTFSDVAIDFSHEEWACLDSAQRDLYKDVMVQNYENLVSVGLSVTKPYVIMLLEDGKEPWMMEKKLSKAYPFPLSHSV

SEQ ID NO: 146 - protein, 80 aa, Homo sapiens
PGPLRSLEMESLQFRDVAVEFSLEEWHCLDTAQQNLYRDVMLENYRHLVFLGIIVSKPDLITCLEQGIKPLTMKRHEMIA

SEQ ID NO: 147 - protein, 80 aa, Homo sapiens
LQTTWPQESVTFEDVAVYFTQNQWASLDPAQRALYGEVMLENYANVASLVAFPFPKPALISHLERGEAPWGPDPWDTEIL

SEQ ID NO: 148 - protein, 80 aa, Homo sapiens
APLLAPRPGETRPGCRKPGTVSFADVAVYFSPEEWGCLRPAQRALYRDVMQETYGHLGALGFPGPKPALISWMEQESEAW

SEQ ID NO: 149 - protein, 80 aa, Homo sapiens
NKVEQKSQESVSFKDVTVGFTQEEWQHLDPSQRALYRDVMLENYSNLVSVGYCVHKPEVIFRLQQGEEPWKQEEEFPSQS

SEQ ID NO: 150 - protein, 80 aa, Homo sapiens
CFSQEERMAAGYLPRWSQELVTFEDVSMDFSQEEWELLEPAQKNLYREVMLENYRNVVSLEALKNQCTDVGIKEGPLSPA

SEQ ID NO: 151 - protein, 80 aa, Homo sapiens
DSVAFEDVAVNFTQEEWALLDPSQKNLYREVMQETLRNLTSIGKKWNNQYIEDEHQNPRRNLRRLIGERLSESKESHQHG

SEQ ID NO: 152 - protein, 80 aa, Homo sapiens
MGPAQVPMNSEVIVDPIQGQVNFEDVFVYFSQEEWVLLDEAQRLLYRDVMLENFALMASLGHTSFMSHIVASLVMGSEPW

SEQ ID NO: 153 - protein, 80 aa, Homo sapiens
TTFKEAMTFKDVAVVFTEEELGLLDLAQRKLYRDVMLENFRNLLSVGHQAFHRDTFHFLREEKIWMMKTAIQREGNSGDK

SEQ ID NO: 154 - protein, 80 aa, Homo sapiens
DSTLLQGGHNLLSSASFQEAVTFKDVIVDFTQEEWKQLDPGQRDLFRDVTLENYTHLVSIGLQVSKPDVISQLEQGTEPW

SEQ ID NO: 155 - protein, 80 aa, Homo sapiens
EARSMLVPPQASVCFEDVAMAFTQEEWEQLDLAQRTLYREVTLETWEHIVSLGLFLSKSDVISQLEQEEDLCRAEQEAPR

SEQ ID NO: 156 - protein, 80 aa, Homo sapiens
DSVVFEDVAVDFTLEEWALLDSAQRDLYRDVMLETFRNLASVDDGTQFKANGSVSLQDMYGQEKSKEQTIPNFTGNNSCA

SEQ ID NO: 157 - protein, 80 aa, Homo sapiens
EESHGALISSCNSRTMTDGLVTFRDVAIDFSQEEWECLDPAQRDLYVDVMLENYSNLVSLDLESKTYETKKIFSENDIFE

SEQ ID NO: 158 - protein, 80 aa, Homo sapiens
VITPQIPMVTEEFVKPSQGHVTFEDIAVYFSQEEWGLLDEAQRCLYHDVMLENFSLMASVGCLHGIEAEEAPSEQTLSAQ

SEQ ID NO: 159 - protein, 80 aa, Homo sapiens
VQLRPQTRMATALRDPASGSVTFEDVAVYFSWEEWDLLDEAQKHLYFDVMLENFALTSSLGCWCGVEHEETPSEQRISGE

SEQ ID NO: 160 - protein, 80 aa, Homo sapiens
MQAQESLTLEDVAVDFTWEEWQFLSPAQKDLYRDVMLENYSNLVAVGYQASKPDALSKLERGEETCTTEDEIYSRICSEI

SEQ ID NO: 161 - protein, 80 aa, Homo sapiens
GPLQFRDVAIEFSLEEWHCLDTAQRNLYRDVMLENYRNLVFLGIVVSKPDLVTCLEQGKKPLTMERHEMIAKPPVMSSHF

SEQ ID NO: 162 - protein, 80 aa, Homo sapiens
NMFKEAVTFKDVAVAFTEEELGLLGPAQRKLYRDVMVENFRNLLSVGHPPFKQDVSPIERNEQLWIMTTATRRQGNLGEK

SEQ ID NO: 163 - protein, 80 aa, Homo sapiens
GALTFRDVAIEFSLEEWQCLDTEQQNLYRNVMLDNYRNLVFLGIAVSKPDLITCLEQEKEPWNLKTHDMVAKPPVICSHI

SEQ ID NO: 164 - protein, 80 aa, Homo sapiens
SPQKSSALAPEDHGSSYEGSVSFRDVAIDFSREEWRHLDPSQRNLYRDVMLETYSHLLSVGYQVPEAEVVMLEQGKEPWA

SEQ ID NO: 165 - protein, 80 aa, Homo sapiens
ELLTFRDVAIEFSPEEWKCLDPAQQNLYRDVMLENYRNLISLGVAISNPDLVIYLEQRKEPYKVKIHETVAKHPAVCSHF

SEQ ID NO: 166 - protein, 80 aa, Homo sapiens
EPLKFRDVAIEFSLEEWQCLDTIQQNLYRNVMLENYRNLVFLGIVVSKPDLITCLEQEKEPWTRKRHRMVAEPPVICSHF

SEQ ID NO: 167 - protein, 80 aa, Homo sapiens
PSARGKSKSKAPITFGDLAIYFSQEEWEWLSPIQKDLYEDVMLENYRNLVSLGLSFRRPNVITLLEKGKAPWMVEPVRRR

SEQ ID NO: 168 - protein, 80 aa, Homo sapiens
TKAQESLTLEDVAVDFTWEEWQFLSPAQKDLYRDVMLENYSNLVSVGYQAGKPDALTKLEQGEPLWTLEDEIHSPAHPEI

SEQ ID NO: 169 - protein, 80 aa, Homo sapiens
SQEEVEVAGIKLCKAMSLGSVTFTDVAIDFSQDEWEWLNLAQRSLYKKVMLENYRNLVSVGLCISKPDVISLLEQEKDPW

SEQ ID NO: 170 - protein, 80 aa, Homo sapiens
TKSLESVSFKDVTVDFSRDEWQQLDLAQKSLYREVMLENYFNLISVGCQVPKPEVIFSLEQEEPCMLDGEIPSQSRPDGD

SEQ ID NO: 171 - protein, 80 aa, Homo sapiens
SGCPGAERNLLVYSYFEKETLTFRDVAIEFSLEEWECLNPAQQNLYMNVMLENYKNLVFLGVAVSKQDPVTCLEQEKEPW

SEQ ID NO: 172 - protein, 80 aa, Homo sapiens
PLQGSVSFKDVTVDFTQEEWQQLDPAQKALYRDVMLENYCHFVSVGFHMAKPDMIRKLEQGEELWTQRIFPSYSYLEEDG

SEQ ID NO: 173 - protein, 80 aa, Homo sapiens
PGPPRSLEMGLLTFRDVAIEFSLEEWQHLDIAQQNLYRNVMLENYRNLAFLGIAVSKPDLITCLEQGKEPWNMKRHEMVD

SEQ ID NO: 174 - protein, 80 aa, Homo sapiens
SGHPGSWEMNSVAFEDVAVNFTQEEWALLDPSQKNLYRDVMQETFRNLASIGNKGEDQSIEDQYKNSSRNLRHIISHSGN

SEQ ID NO: 175 - protein, 80 aa, Homo sapiens
SYGSITFGDVAIDFSHQEWEYLSLVQKTLYQEVMMENYDNLVSLAGHSVSKPDLITLLEQGKEPWMIVREETRGECTDLD

SEQ ID NO: 176 - protein, 80 aa, Homo sapiens
DLFVCSGLEPHTPSVGSQESVTFQDVAVDFTEKEWPLLDSSQRKLYKDVMLENYSNLTSLGYQVGKPSLISHLEQEEEPR

SEQ ID NO: 177 - protein, 80 aa, Homo sapiens
FQTAWRQEPVTFEDVAVYFTQNEWASLDSVQRALYREVMLENYANVASLAFPFTTPVLVSQLEQGELPWGLDPWEPMGRE

SEQ ID NO: 178 - protein, 80 aa, Homo sapiens
ELLTFRDVAIEFSPEEWKCLDPDQQNLYRDVMLENYRNLVSLGVAISNPDLVTCLEQRKEPYNVKIHKIVARPPAMCSHF

SEQ ID NO: 179 - protein, 80 aa, Homo sapiens
AGEAEAQLDPSLQGLVMFEDVTVYFSREEWGLLNVTQKGLYRDVMLENFALVSSLGLAPSRSPVFTQLEDDEQSWVPSWV

SEQ ID NO: 180 - protein, 80 aa, Homo sapiens
AHALVTFRDVAIDFSQKEWECLDTTQRKLYRDVMLENYNNLVSLGYSGSKPDVITLLEQGKEPCVVARDVTGRQCPGLLS

SEQ ID NO: 181 - protein, 80 aa, Homo sapiens
KRIKHWKMASKLILPESLSLLTFEDVAVYFSEEEWQLLNPLEKTLYNDVMQDIYETVISLGLKLKNDTGNDHPISVSTSE

SEQ ID NO: 182 - protein, 80 aa, Homo sapiens
DSVVFEDVAVDFTLEEWALLDSAQRDLYRDVMLETFQNLASVDDETQFKASGSVSQQDIYGEKIPKESKIATFTRNVSWA

SEQ ID NO: 183 - protein, 80 aa, Homo sapiens
NMSQASVSFQDVTVEFTREEWQHLGPVERTLYRDVMLENYSHLISVGYCITKPKVISKLEKGEEPWSLEDEFLNQRYPGY

SEQ ID NO: 184 - protein, 80 aa, Homo sapiens
ISFQESVTFQDVAVDFTAEEWQLLDCAERTLYWDVMLENYRNLISVGCPITKTKVILKVEQGQEPWMVEGANPHESSPES

SEQ ID NO: 185 - protein, 80 aa, Homo sapiens
NTLQGPVSFKDVAVDFTQEEWQQLDPDEKITYRDVMLENYSHLVSVGYDTTKPNVIIKLEQGEEPWIMGGEFPCQHSPEA

SEQ ID NO: 186 - protein, 80 aa, Homo sapiens
HPEEEERMHDELLQAVSKGPVMFRDVSIDFSQEEWECLDADQMNLYKEVMLENFSNLVSVGLSNSKPAVISLLEQGKEPW

SEQ ID NO: 187 - protein, 80 aa, Homo sapiens
SLGSELFRDVAIVFSQEEWQWLAPAQRDLYRDVMLETYSNLVSLGLAVSKPDVISFLEQGKEPWMVERVVSGGLCPVLES

SEQ ID NO: 188 - protein, 80 aa, Homo sapiens
TKFQEMVTFKDVAVVFTEEELGLLDSVQRKLYRDVMLENFRNLLLVAHQPFKPDLISQLEREEKLLMVETETPRDGCSGR

SEQ ID NO: 189 - protein, 80 aa, Homo sapiens
AKRPGPPGSREMGLLTFRDIAIEFSLAEWQCLDHAQQNLYRDVMLENYRNLVSLGIAVSKPDLITCLEQNKEPQNIKRNE

SEQ ID NO: 190 - protein, 80 aa, Homo sapiens
TCMVHRQTMSCSGAGGITAFVAFRDVAVYFTQEEWRLLSPAQRTLHREVMLETYNHLVSLEIPSSKPKLIAQLERGEAPW

SEQ ID NO: 191 - protein, 80 aa, Homo sapiens
IQAQESITLEDVAVDFTWEEWQLLGAAQKDLYRDVMLENYSNLVAVGYQASKPDALFKLEQGEQLWTIEDGIHSGACSDI

SEQ ID NO: 192 - protein, 80 aa, Homo sapiens
AQKRRKRKAKESGMALPQGHLTFRDVAIEFSQAEWKCLDPAQRALYKDVMLENYRNLVSLGISLPDLNINSMLEQRREPW

SEQ ID NO: 193 - protein, 80 aa, Homo sapiens
DSTSVPVTAEAKLMGFTQGCVTFEDVAIYFSQEEWGLLDEAQRLLYRDVMLENFALITALVCWHGMEDEETPEQSVSVEG

SEQ ID NO: 194 - protein, 80 aa, Homo sapiens
GPLTFRDVKIEFSLEEWQCLDTAQRNLYRDVMLENYRNLVFLGIAVSKPDLITWLEQGKEPWNLKRHEMVDKTPVMCSHF

SEQ ID NO: 195 - protein, 80 aa, Homo sapiens
SGCPGAERSLLVQSYFEKGPLTFRDVAIEFSLEEWQCLDSAQQGLYRKVMLENYRNLVFLAGIALTKPDLITCLEQGKEP

SEQ ID NO: 196 - protein, 80 aa, Homo sapiens
GVLTFRDVAVEFSPEEWECLDSAQQRLYRDVMLENYGNLVSLGLAIFKPDLMTCLEQRKEPWKVKRQEAVAKHPAGSFHF

SEQ ID NO: 197 - protein, 80 aa, Homo sapiens
KENLEDISGWGLPEARSKESVSFKDVAVDFTQEEWGQLDSPQRALYRDVMLENYQNLLALGPPLHKPDVISHLERGEEPW

SEQ ID NO: 198 - protein, 80 aa, Homo sapiens
EESEKPRGFARGLEPERIIGATDSSGELMFLMKWKNSDEADLVPAKEANVKCPQVVISFYEERLTWHSYPSEDDDKKDDK

SEQ ID NO: 199 - protein, 80 aa, Homo sapiens
ASVALEDVAVNFTREEWALLGPCQKNLYKDVMQETIRNLDCVVMKWKDQNIEDQYRYPRKNLRCRMLERFVESKDGTQCG

SEQ ID NO: 200 - protein, 80 aa, Homo sapiens
TLLTFRDVAIEFSLEEWKCLDLAQQNLYRDVMLENYRNLFSVGLTVCKPGLITCLEQRKEPWNVKRQEAADGHPEMGFHH

SEQ ID NO: 201 - protein, 80 aa, Homo sapiens
AAALRAPTQQVFVAFEDVAIYFSQEEWELLDEMQRLLYRDVMLENFAVMASLGCWCGAVDEGTPSAESVSVEELSQGRTP

SEQ ID NO: 202 - protein, 80 aa, Homo sapiens
NTFQASVSFQDVTVEFSQEEWQHMGPVERTLYRDVMLENYSHLVSVGYCFTKPELIFTLEQGEDPWLLEKEKGFLSRNSP

SEQ ID NO: 203 - protein, 80 aa, Homo sapiens
DSVAFEDVSVSFSQEEWALLAPSQKKLYRDVMQETFKNLASIGEKWEDPNVEDQHKNQGRNLRSHTGERLCEGKEGSQCA

SEQ ID NO: 204 - protein, 80 aa, Homo sapiens
AQGLVTFADVAIDFSQEEWACLNSAQRDLYWDVMLENYSNLVSLDLESAYENKSLPTEKNIHEIRASKRNSDRRSKSLGR

SEQ ID NO: 205 - protein, 80 aa, Homo sapiens
AVDLLSAQEPVTFRDVAVFFSQDEWLHLDSAQRALYREVMLENYSSLVSLGIPFSMPKLIHQLQQGEDPCMVEREVPSDT

SEQ ID NO: 206 - protein, 80 aa, Homo sapiens
SPQRFPALIPGEPGRSFEGSVSFEDVAVDFTRQEWHRLDPAQRTMHKDVMLETYSNLASVGLCVAKPEMIFKLERGEELW

SEQ ID NO: 207 - protein, 80 aa, Homo sapiens
RVLTFRDVAVEFSPEEWECLDSAQQRLYRDVMLENYGNLFSLGLAIFKPDLITYLEQRKEPWNARRQKTVAKHPAGSLHF

SEQ ID NO: 208 - protein, 80 aa, Homo sapiens
AETKDAAQMLVTFKDVAVTFTREEWRQLDLAQRTLYREVMLETCGLLVSLGHRVPKPELVHLLEHGQELWIVKRGLSHAT

SEQ ID NO: 209 - protein, 80 aa, Homo sapiens
IEYQIPVSFKDVVVGFTQEEWHRLSPAQRALYRDVMLETYSNLVSVGYEGTKPDVILRLEQEEAPWIGEAACPGCHCWED

SEQ ID NO: 210 - protein, 80 aa, Homo sapiens
TKFQEAVTFKDVAVAFTEEELGLLDSAQRKLYRDVMLENFRNLVSVGHQSFKPDMISQLEREEKLWMKELQTQRGKHSGD

SEQ ID NO: 211 - protein, 80 aa, Homo sapiens
DEGVAGVMSVGPPAARLQEPVTFRDVAVDFTQEEWGQLDPTQRILYRDVMLETFGHLLSIGPELPKPEVISQLEQGTELW

SEQ ID NO: 212 - protein, 80 aa, Homo sapiens
GPLTFMDVAIEFSVEEWQCLDTAQQNLYRNVMLENYRNLVFLGIAVSKPDLITCLEQGKEPWNMERHEMVAKPPGMCCYF

SEQ ID NO: 213 - protein, 80 aa, Homo sapiens
HQVGLIRSYNSKTMTCFQELVTFRDVAIDFSRQEWEYLDPNQRDLYRDVMLENYRNLVSLGGHSISKPVVVDLLERGKEP

SEQ ID NO: 214 - protein, 80 aa, Homo sapiens
NATIVMSVRREQGSSSGEGSLSFEDVAVGFTREEWQFLDQSQKVLYKEVMLENYINLVSIGYRGTKPDSLFKLEQGEPPG

SEQ ID NO: 215 - protein, 80 aa, Homo sapiens
FPPARGKELLSFEDVAMYFTREEWGHLNWGQKDLYRDVMLENYRNMVLLGFQFPKPEMICQLENWDEQWILDLPRTGNRK

SEQ ID NO: 216 - protein, 80 aa, Homo sapiens
ELLTFKDVAIEFSPEEWKCLDTSQQNLYRDVMLENYRNLVSLGVSISNPDLVTSLEQRKEPYNLKIHETAARPPAVCSHF

SEQ ID NO: 217 - protein, 80 aa, Homo sapiens
MKSQGLVSFKDVAVDFTQEEWQQLDPSQRTLYRDVMLENYSHLVSMGYPVSKPDVISKLEQGEEPWIIKGDISNWIYPDE

SEQ ID NO: 218 - protein, 80 aa, Homo sapiens
AEGSVMFSDVSIDFSQEEWDCLDPVQRDLYRDVMLENYGNLVSMGLYTPKPQVISLLEQGKEPWMVGRELTRGLCSDLES

SEQ ID NO: 219 - protein, 80 aa, Homo sapiens
GPLTFTDVAIEFSLEEWQCLDTAQQNLYRNVMLENYRNLVFLGIAVSKPDLITCLEKEKEPCKMKRHEMVDEPPVVCSHF

SEQ ID NO: 220 - protein, 80 aa, Homo sapiens
ALSQGLFTFKDVAIEFSQEEWECLDPAQRALYRDVMLENYRNLLSLDEDNIPPEDDISVGFTSKGLSPKENNKEELYHLV

SEQ ID NO: 221 - protein, 80 aa, Homo sapiens
NMEGLVMFQDLSIDFSQEEWECLDAAQKDLYRDVMMENYSSLVSLGLSIPKPDVISLLEQGKEPWMVSRDVLGGWCRDSE

SEQ ID NO: 222 - protein, 80 aa, Homo sapiens
AVSHLPTMVQESVTFKDVAILFTQEEWGQLSPAQRALYRDVMLENYSNLVSLGLLGPKPDTFSQLEKREVWMPEDTPGGF

SEQ ID NO: 223 - protein, 80 aa, Homo sapiens
GPLTIRDVTVEFSLEEWHCLDTAQQNLYRDVMLENYRNLVFLGIAVSKPDLITCLEQGKEPCNMKRHEMVAKPPVMCSHI

SEQ ID NO: 224 - protein, 80 aa, Homo sapiens
AAAVLTDRAQVSVTFDDVAVTFTKEEWGQLDLAQRTLYQEVMLENCGLLVSLGCPVPKAELICHLEHGQEPWTRKEDLSQ

SEQ ID NO: 225 - protein, 80 aa, Homo sapiens
ALRSVMFSDVSIDFSPEEWEYLDLEQKDLYRDVMLENYSNLVSLGCFISKPDVISSLEQGKEPWKVVRKGRRQYPDLETK

SEQ ID NO: 226 - protein, 80 aa, Homo sapiens
AHGSVTFRDVAIDFSQEEWEFLDPAQRDLYRDVMWENYSNFISLGPSISKPDVITLLDEERKEPGMVVREGTRRYCPDLE

SEQ ID NO: 227 - protein, 80 aa, Homo sapiens
APRAQIQGPLTFGDVAVAFTRIEWRHLDAAQRALYRDVMLENYGNLVSVGLLSSKPKLITQLEQGAEPWTEVREAPSGTH

SEQ ID NO: 228 - protein, 80 aa, Homo sapiens
GPLQFRDVAIEFSLEEWHCLDTAQRNLYRNVMLENYRNLVFLGIVVSKPDLITCLEQGKKPLTMKKHEMVANPSVTCSHF

SEQ ID NO: 229 - protein, 80 aa, Homo sapiens
TLPRGQPEVLEWGLPKDQDSVAFEDVAVNFTHEEWALLGPSQKNLYRDVMRETIRNLNCIGMKWENQNIDDQHQNLRRNP

SEQ ID NO: 230 - protein, 80 aa, Homo sapiens
PSPDSMTFEDIIVDFTQEEWALLDTSQRKLFQDVMLENISHLVSIGKQLCKSVVLSQLEQVEKLSTQRISLLQGREVGIK

SEQ ID NO: 231 - protein, 80 aa, Homo sapiens
EESREIRAGQIVLKAMAQGLVTFRDVAIEFSLEEWKCLEPAQRDLYREVTLENFGHLASLGLSISKPDVVSLLEQGKEPW

SEQ ID NO: 232 - protein, 80 aa, Homo sapiens
AASAQVSVTFEDVAVTFTQEEWGQLDAAQRTLYQEVMLETCGLLMSLGCPLFKPELIYQLDHRQELWMATKDLSQSSYPG

SEQ ID NO: 233 - protein, 80 aa, Homo sapiens
RESLEDEVTPGLPTAESQELLTFKDISIDFTQEEWGQLAPAHQNLYREVMLENYSNLVSVGYQLSKPSVISQLEKGEEPW

SEQ ID NO: 234 - protein, 80 aa, Homo sapiens
EGEYIKLKVIGQDSSEIHFKVKMTTHLKKLKESYCQRQGVPMNSLRFLFEGQRIADNHTPKELGMEEEDVIEVYQEQTGG

SEQ ID NO: 235 - protein, 80 aa, Homo sapiens
NKSLGPVSFKDVAVDFTQEEWQQLDPEQKITYRDVMLENYSNLVSVGYHIIKPDVISKLEQGEEPWIVEGEFLLQSYPDE

SEQ ID NO: 236 - protein, 80 aa, Homo sapiens
SPGLLTTRKEALMAFRDVAVAFTQKEWKLLSSAQRTLYREVMLENYSHLVSLGIAFSKPKLIEQLEQGDEPWREENEHLL

SEQ ID NO: 237 - protein, 80 aa, Homo sapiens
MFQDSVAFEDVAVTFTQEEWALLDPSQKNLCRDVMQETFRNLASIGKKWKPQNIYVEYENLRRNLRIVGERLFESKEGHQ

SEQ ID NO: 238 - protein, 80 aa, Homo sapiens
ENDHINLKVAGQDGSVVQFKIKRHTPLSKLMKAYCERQGLSMRQIRFRFDGQPINETDTPAQLEMEDEDTIDVFQQQTGG

SEQ ID NO: 239 - protein, 80 aa, Homo sapiens
PGPLGSLEMGVLTFRDVALEFSLEEWQCLDTAQQNLYRNVMLENYRNLVFVGIAASKPDLITCLEQGKEPWNVKRHEMVT

SEQ ID NO: 240 - protein, 80 aa, Homo sapiens
LSQKPQVLGPEKQDGSCEASVSFEDVTVDFSREEWQQLDPAQRCLYRDVMLELYSHLFAVGYHIPNPEVIFRMLKEKEPR

SEQ ID NO: 241 - protein, 80 aa, Homo sapiens
ALTQGQVTFRDVAIEFSQEEWTCLDPAQRTLYRDVMLENYRNLASLGISCFDLSIISMLEQGKEPFTLESQVQIAGNPDG

SEQ ID NO: 242 - protein, 80 aa, Homo sapiens
NKFQGPVTLKDVIVEFTKEEWKLLTPAQRTLYKDVMLENYSHLVSVGYHVNKPNAVFKLKQGKEPWILEVEFPHRGFPED

SEQ ID NO: 243 - protein, 80 aa, Homo sapiens
ELLTFRDVAIEFSPEEWKCLDPAQQNLYRDVMLENYRNLVSLAVYSYYNQGILPEQGIQDSFKKATLGRYGSCGLENICL

SEQ ID NO: 244 - protein, 80 aa, Homo sapiens
SPQKSSALAPEDHGSSYEGSVSFRDVAIDFSREEWRHLDLSQRNLYRDVMLETYSHLLSVGYQVPKPEVVMLEQGKEPWA

SEQ ID NO: 245 - protein, 80 aa, Homo sapiens
NNSQGRVTFEDVTVNFTQGEWQRLNPEQRNLYRDVMLENYSNLVSVGQGETTKPDVILRLEQGKEPWLEEEEVLGSGRAE

SEQ ID NO: 246 - protein, 80 aa, Homo sapiens
AMALPMPGPQEAVVFEDVAVYFTRIEWSCLAPDQQALYRDVMLENYGNLASLGFLVAKPALISLLEQGEEPGALILQVAE

SEQ ID NO: 247 - protein, 80 aa, Homo sapiens
DSSQHLVTFEDVAVDFTQEEWTLLDQAQRDLYRDVMLENYKNLIILAGSELFKRSLMSGLEQMEELRTGVTGVLQELDLQ

SEQ ID NO: 248 - protein, 80 aa, Homo sapiens
TTFKEAVTFKDVAVFFTEEELGLLDPAQRKLYQDVMLENFTNLLSVGHQPFHPFHFLREEKFWMMETATQREGNSGGKTI

SEQ ID NO: 249 - protein, 80 aa, Homo sapiens
GPLQFRDVAIEFSLEEWHCLDMAQRNLYRDVMLENYRNLVFLGIVVSKPDLITHLEQGKKPSTMQRHEMVANPSVLCSHF

SEQ ID NO: 250 - protein, 80 aa, Homo sapiens
NKSQGSVSFTDVTVDFTQEEWEQLDPSQRILYMDVMLENYSNLLSVEVWKADDQMERDHRNPDEQARQFLILKNQTPIEE

SEQ ID NO: 251 - protein, 80 aa, Homo sapiens
EEEEMNDGSQMVRSQESLTFQDVAVDFTREEWDQLYPAQKNLYRDVMLENYRNLVALGYQLCKPEVIAQLELEEEWVIER

SEQ ID NO: 252 - protein, 80 aa, Homo sapiens
EEATKKSKEKEPGMALPQGRLTFRDVAIEFSLEEWKCLNPAQRALYRAVMLENYRNLEFVDSSLKSMMEFSSTRHSITGE

SEQ ID NO: 253 - protein, 80 aa, Homo sapiens
EKTPAGRIVADCLTDCYQDSVTFDDVAVDFTQEEWTLLDSTQRSLYSDVMLENYKNLATVGGQIIKPSLISWLEQEESRT

SEQ ID NO: 254 - protein, 80 aa, Homo sapiens
AMSQESLTFKDVFVDFTLEEWQQLDSAQKNLYRDVMLENYSHLVSVGHLVGKPDVIFRLGPGDESWMADGGTPVRTCAGE

SEQ ID NO: 255 - protein, 80 aa, Homo sapiens
DSVAFEDVAVNFTLEEWALLDPSQKNLYRDVMRETFRNLASVGKQWEDQNIEDPFKIPRRNISHIPERLCESKEGGQGEE

SEQ ID NO: 256 - protein, 80 aa, Homo sapiens
MFQDSVAFEDVAVSFTQEEWALLDPSQKNLYRDVMQETFKNLTSVGKTWKVQNIEDEYKNPRRNLSLMREKLCESKESHH

SEQ ID NO: 257 - protein, 80 aa, Homo sapiens
AVVATLRLSAQGTVTFEDVAVKFTQEEWNLLSEAQRCLYRDVTLENLALMSSLGCWCGVEDEAAPSKQSIYIQRETQVRT

SEQ ID NO: 258 - protein, 80 aa, Homo sapiens
EEEEEDEDEDDLLTAGCQELVTFEDVAVYFSLEEWERLEADQRGLYQEVMQENYGILVSLGYPIPKPDLIFRLEQGEEPW

SEQ ID NO: 259 - protein, 80 aa, Homo sapiens
TKFQEMVTFKDVAVVFTREELGLLDLAQRKLYQDVMLENFRNLLSVGYQPFKLDVILQLGKEDKLRMMETEIQGDGCSGH

SEQ ID NO: 260 - protein, 80 aa, Homo sapiens
EEAAQKRKGKEPGMALPQGRLTFRDVAIEFSLAEWKCLNPSQRALYREVMLENYRNLEAVDISSKCMMKEVLSTGQGNTE

SEQ ID NO: 261 - protein, 80 aa, Homo sapiens
DTVVFEDVVVDFTLEEWALLNPAQRKLYRDVMLETFKHLASVDNEAQLKASGSISQQDTSGEKLSLKQKIEKFTRKNIWA

SEQ ID NO: 262 - protein, 80 aa, Homo sapiens
TTFKEGLTFKDVAVVFTEEELGLLDPVQRNLYQDVMLENFRNLLSVGHHPFKHDVFLLEKEKKLDIMKTATQRKGKSADK

SEQ ID NO: 263 - protein, 80 aa, Homo sapiens
SALQQEFWKIQTSNGIQMDLVTFDSVAVEFTQEEWTLLDPAQRNLYSDVMLENYKNLSSVGYQLFKPSLISWLEEEEELS

SEQ ID NO: 264 - protein, 80 aa, Homo sapiens
DCVIFEEVAVNFTPEEWALLDHAQRSLYRDVMLETCRNLASLDCYIYVRTSGSSSQRDVFGNGISNDEEIVKFTGSDSWS

SEQ ID NO: 265 - protein, 80 aa, Homo sapiens
ELLTFRDVTIEFSLEEWEFLNPAQQSLYRKVMLENYRNLVSLGLTVSKPELISRLEQRQEPWNVKRHETIAKPPAMSSHY

SEQ ID NO: 266 - protein, 80 aa, Homo sapiens
IKTQESLTLEDVAVEFSWEEWQLLDTAQKNLYRDVMVENYNHLVSLGYQTSKPDVLSKLAHGQEPWTTDAKIQNKNCPGI

SEQ ID NO: 267 - protein, 80 aa, Homo sapiens
PAHVPGEAGPRRTRESRPGAVSFADVAVYFSPEEWECLRPAQRALYRDVMRETFGHLGALGFSVPKPAFISWVEGEVEAW

SEQ ID NO: 268 - protein, 80 aa, Homo sapiens
GCPGDQVTPTRSLTAQLQETMTFKDVEVTFSQDEWGWLDSAQRNLYRDVMLENYRNMASLVGPFTKPALISWLEAREPWG

SEQ ID NO: 269 - protein, 80 aa, Homo sapiens
ARDLVMFRDVAVDFSQEEWECLNSYQRNLYRDVILENYSNLVSLAGCSISKPDVITLLEQGKEPWMVVRDEKRRWTLDLE

SEQ ID NO: 270 - protein, 80 aa, Homo sapiens
TTLKEAVTFKDVAVVFTEEELRLLDLAQRKLYREVMLENFRNLLSVGHQSLHRDTFHFLKEEKFWMMETATQREGNLGGK

SEQ ID NO: 271 - protein, 80 aa, Homo sapiens
SPPSPRSSMAAVALRDSAQGMTFEDVAIYFSQEEWELLDESQRFLYCDVMLENFAHVTSLGYCHGMENEAIASEQSVSIQ

SEQ ID NO: 272 - protein, 80 aa, Homo sapiens
DEEAQKRKAKESGMALPQGRLTFMDVAIEFSQEEWKSLDPGQRALYRDVMLENYRNLVFLGICLPDLSIISMLKQRREPL

SEQ ID NO: 273 - protein, 80 aa, Homo sapiens
ALTQGPLKFMDVAIEFSQEEWKCLDPAQRTLYRDVMLENYRNLVSLGICLPDLSVTSMLEQKRDPWTLQSEEKIANDPDG

SEQ ID NO: 274 - protein, 80 aa, Homo sapiens
TMFKEAVTFKDVAVVFTEEELGLLDVSQRKLYRDVMLENFRNLLSVGHQLSHRDTFHFQREEKFWIMETATQREGNSGGK

SEQ ID NO: 275 - protein, 80 aa, Homo sapiens
QGTVAFEDVAVNFSQEEWSLLSEVQRCLYHDVMLENWVLISSLGCWCGSEDEEAPSKKSISIQRVSQVSTPGAGVSPKKA

SEQ ID NO: 276 - protein, 80 aa, Homo sapiens
AEAFGDSEEDGEDVFEVEKILDMKTEGGKVLYKVRWKGYTSDDDTWEPEIHLEDCKEVLLEFRKKIAENKAKAVRKDIQR

SEQ ID NO: 277 - protein, 80 aa, Homo sapiens
VLQMQNSEHHGQSIKTQTDSISLEDVAVNFTLEEWALLDPGQRNIYRDVMRATFKNLACIGEKWKDQDIEDEHKNQGRNL

SEQ ID NO: 278 - protein, 80 aa, Homo sapiens
AMALTDPAQVSVTFDDVAVTFTQEEWGQLDLAQRTLYQEVMLENCGLLVSLGCPVPRPELIYHLEHGQEPWTRKEDLSQG

SEQ ID NO: 279 - protein, 80 aa, Homo sapiens
VHGSVTFRDVAIDFSQEEWECLQPDQRTLYRDVMLENYSHLISLGSSISKPDVITLLEQEKEPWIVVSKETSRWYPDLES

SEQ ID NO: 280 - protein, 80 aa, Homo sapiens
DPVACEDVAVNFTQEEWALLDISQRKLYREVMLETFRNLTSIGKKWKDQNIEYEYQNPRRNFRSLIEGNVNEIKEDSHCG

SEQ ID NO: 281 - protein, 80 aa, Homo sapiens
IKFQERVTFKDVAVVFTKEELALLDKAQINLYQDVMLENFRNLMLVRDGIKNNILNLQAKGLSYLSQEVLHCWQIWKQRI

SEQ ID NO: 282 - protein, 80 aa, Homo sapiens
GPLTFRDVAIEFSLKEWQCLDTAQRNLYRNVMLENYRNLVFLGITVSKPDLITCLEQGKEAWSMKRHEIMVAKPTVMCSH

SEQ ID NO: 283 - protein, 80 aa, Homo sapiens
TMSKEAVTFKDVAVVFTEEELGLLDLAQRKLYRDVMLENFRNLLSVGHQPFHRDTFHFLREEKFWMMDIATQREGNSGGK

SEQ ID NO: 284 - protein, 80 aa, Homo sapiens
GPLEFRDVAIEFSLEEWHCLDTAQQNLYRDVMLENYRHLVFLGIVVTKPDLITCLEQGKKPFTVKRHEMIAKSPVMCFHF

SEQ ID NO: 285 - protein, 80 aa, Homo sapiens
GHTEGGELVNELLKSWLKGLVTFEDVAVEFTQEEWALLDPAQRTLYRDVMLENCRNLASLGNQVDKPRLISQLEQEDKVM

SEQ ID NO: 286 - protein, 80 aa, Homo sapiens
AEPASVTVTFDDVALYFSEQEWEILEKWQKQMYKQEMKTNYETLDSLGYAFSKPDLITWMEQGRMLLISEQGCLDKTRRT

SEQ ID NO: 287 - protein, 80 aa, Homo sapiens
HSQASAISQDREEKIMSQEPLSFKDVAVVFTEEELELLDSTQRQLYQDVMQENFRNLLSVGERNPLGDKNGKDTEYIQDE

SEQ ID NO: 288 - protein, 80 aa, Homo sapiens
GSLEEGRRATGLPAAQVQEPVTFKDVAVDFTQEEWGQLDLVQRTLYRDVMLETYGHLLSVGNQIAKPEVISLLEQGEEPW

SEQ ID NO: 289 - protein, 80 aa, Homo sapiens
TTFKEAVTFKDVAVVFTEEELGLLDPAQRKLYRDVMLENFRNLLSVGHQPFHQDTCHFLREEKFWMMGTATQREGNSGGK

SEQ ID NO: 290 - protein, 80 aa, Homo sapiens
AKLYEAVTFKDVAVIFTEEELGLLDPAQRKLYRDVMLENFRNLLSVGGKIQTEMETVPEAGTHEEFSCKQIWEQIASDLT

SEQ ID NO: 291 - protein, 80 aa, Homo sapiens
RSDLFLPDSQTNEERKQYDSVAFEDVAVNFTQEEWALLGPSQKSLYRDVMWETIRNLDCIGMKWEDTNIEDQHRNPRRSL

SEQ ID NO: 292 - protein, 80 aa, Homo sapiens
PGTPGSLEMGLLTFRDVAIEFSPEEWQCLDTAQQNLYRNVMLENYRNLAFLGIALSKPDLITYLEQGKEPWNMKQHEMVD

SEQ ID NO: 293 - protein, 80 aa, Homo sapiens
TPGVRVSTDPEQVTFEDVVVGFSQEEWGQLKPAQRTLYRDVMLDTFRLLVSVGHWLPKPNVISLLEQEAELWAVESRLPQ

SEQ ID NO: 294 - protein, 80 aa, Homo sapiens
EQTQAAGMVAGWLINCYQDAVTFDDVAVDFTQEEWTLLDPSQRDLYRDVMLENYENLASVEWRLKTKGPALRQDRSWFRA

SEQ ID NO: 295 - protein, 80 aa, Homo sapiens
PSEANSIQSANATTKTSETNHTSRPRLKNVDRSTAQQLAVTVGNVTVIITDFKEKTRSSSTSSSTVTSSAGSEQQNQSSS

SEQ ID NO: 296 - protein, 80 aa, Homo sapiens
ALTQGQLSFSDVAIEFSQEEWKCLDPGQKALYRDVMLENYRNLVSLGEDNVRPEACICSGICLPDLSVTSMLEQKRDPWT

SEQ ID NO: 297 - protein, 80 aa, Homo sapiens
AAAAALRAPAQSSVTFEDVAVNFSLEEWSLLNEAQRCLYRDVMLETLTLISSLGCWHGGEDEAAPSKQSTCIHIYKDQGG

SEQ ID NO: 298 - protein, 80 aa, Homo sapiens
AQGSVSFNDVTVDFTQEEWQHLDHAQKTLYMDVMLENYCHLISVGCHMTKPDVILKLERGEEPWTSFAGHTCLEENWKAE

SEQ ID NO: 299 - protein, 80 aa, Homo sapiens
DPVAFKDVAVNFTQEEWALLDISQRKLYREVMLETFRNLTSLGKRWKDQNIEYEHQNPRRNFRSLIEEKVNEIKDDSHCG

SEQ ID NO: 300 - protein, 80 aa, Homo sapiens
SKDLVTFGDVAVNFSQEEWEWLNPAQRNLYRKVMLENYRSLVSLGVSVSKPDVISLLEQGKEPWMVKKEGTRGPCPDWEY

SEQ ID NO: 301 - protein, 80 aa, Homo sapiens
DSVAFEDVAINFTCEEWALLGPSQKSLYRDVMQETIRNLDCIGMIWQNHDIEEDQYKDLRRNLRCHMVERACEIKDNSQC

SEQ ID NO: 302 - protein, 80 aa, Homo sapiens
GPLTFMDVAIEFCLEEWQCLDIAQQNLYRNVMLENYRNLVFLGIAVSKPDLITCLEQEKEPWEPMRRHEMVAKPPVMCSH

SEQ ID NO: 303 - protein, 80 aa, Homo sapiens
QSNDIARGFERGLEPEKIIGATDSCGDLMFLMKWKDTDEADLVLAKEANVKCPQIVIAFYEERLTWHAYPEDAENKEKET

SEQ ID NO: 304 - protein, 80 aa, Homo sapiens
ALPAKDSAWPWEEKPRYLGPVTFEDVAVLFTEAEWKRLSLEQRNLYKEVMLENLRNLVSLAESKPEVHTCPSCPLAFGSQ

SEQ ID NO: 305 - protein, 80 aa, Homo sapiens
DAKSLTAWSRTLVTFKDVFVDFTREEWKLLDTAQQIVYRNVMLENYKNLVSLGYQLTKPDVILRLEKGEEPWLVEREIHQ

SEQ ID NO: 306 - protein, 80 aa, Homo sapiens
DAVAFEDVAVNFTQEEWALLGPSQKNLYRYVMQETIRNLDCIRMIWEEQNTEDQYKNPRRNLRCHMVERFSESKDSSQCG

SEQ ID NO: 307 - protein, 80 aa, Homo sapiens
EKTKVERMVEDYLASGYQDSVTFDDVAVDFTPEEWALLDTTEKYLYRDVMLENYMNLASVEWEIQPRTKRSSLQQGFLKN

SEQ ID NO: 308 - protein, 80 aa, Homo sapiens
DSVAFEDVDVNFTQEEWALLDPSQKNLYRDVMWETMRNLASIGKKWKDQNIKDHYKHRGRNLRSHMLERLYQTKDGSQRG

SEQ ID NO: 309 - protein, 80 aa, Homo sapiens
IESQEPVTFEDVAVDFTQEEWQQLNPAQKTLHRDVMLETYNHLVSVGCSGIKPDVIFKLEHGKDPWIIESELSRWIYPDR

SEQ ID NO: 310 - protein, 80 aa, Homo sapiens
AVGLCKAMSQGLVTFRDVALDFSQEEWEWLKPSQKDLYRDVMLENYRNLVWLGLSISKPNMISLLEQGKEPWMVERKMSQ

SEQ ID NO: 311 - protein, 80 aa, Homo sapiens
DKVEEEAMAPGLPTACSQEPVTFADVAVVFTPEEWVFLDSTQRSLYRDVMLENYRNLASVADQLCKPNALSYLEERGEQW

SEQ ID NO: 312 - protein, 80 aa, Homo sapiens
TFEDVAVYFSQEEWGLLDTAQRALYRHVMLENFTLVTSLGLSTSRPRVVIQLERGEEPWVPSGKDMTLARNTYGRLNSGS

SEQ ID NO: 313 - protein, 80 aa, Homo sapiens
AEPPRLPLTFEDVAIYFSEQEWQDLEAWQKELYKHVMRSNYETLVSLDDGLPKPELISWIEHGGEPFRKWRESQKSGNII

SEQ ID NO: 314 - protein, 80 aa, Homo sapiens
DSVVFEDVAVNFTQEEWALLGPSQKKLYRDVMQETFVNLASIGENWEEKNIEDHKNQGRKLRSHMVERLCERKEGSQFGE

SEQ ID NO: 315 - protein, 80 aa, Homo sapiens
AAAALRDPAQGCVTFEDVTIYFSQEEWVLLDEAQRLLYCDVMLENFALIASLGLISFRSHIVSQLEMGKEPWVPDSVDMT

SEQ ID NO: 316 - protein, 80 aa, Homo sapiens
AAPALALVSFEDVVVTFTGEEWGHLDLAQRTLYQEVMLETCRLLVSLGHPVPKPELIYLLEHGQELWTVKRGLSQSTCAG

SEQ ID NO: 317 - protein, 80 aa, Homo sapiens
IKSQESLTLEDVAVEFTWEEWQLLGPAQKDLYRDVMLENYSNLVSVGYQASKPDALFKLEQGEPWTVENEIHSQICPEIK

SEQ ID NO: 318 - protein, 80 aa, Homo sapiens
GESLESRVTLGSLTAESQELLTFKDVSVDFTQEEWGQLAPAHRNLYREVMLENYGNLVSVGCQLSKPGVISQLEKGEEPW

SEQ ID NO: 319 - protein, 80 aa, Homo sapiens
ASVALEDVAVNFTREEWALLGPCQKNLYKDVMQETIRNLDCVGMKWKDQNIEDQYRYPRKNLRCRMLERFVESKDGTQCG

SEQ ID NO: 320 - protein, 80 aa, Homo sapiens
TESQGTVTFKDVAIDFTQEEWKRLDPAQRKLYRNVMLENYNNLITVGYPFTKPDVIFKLEQEEEPWVMEEEVLRRHWQGE

SEQ ID NO: 321 - protein, 80 aa, Homo sapiens
DSVASEDVAVNFTLEEWALLDPSQKKLYRDVMRETFRNLACVGKKWEDQSIEDWYKNQGRILRNHMEEGLSESKEYDQCG

SEQ ID NO: 322 - protein, 80 aa, Homo sapiens
EETQGELTSSCGSKTMANVSLAFRDVSIDLSQEEWECLDAVQRDLYKDVMLENYSNLVSLGYTIPKPDVITLLEQEKEPW

SEQ ID NO: 323 - protein, 80 aa, Homo sapiens
AAILLTTRPKVPVSFEDVSVYFTKTEWKLLDLRQKVLYKRVMLENYSHLVSLGFSFSKPHLISQLERGEGPWVADIPRTW

SEQ ID NO: 324 - protein, 80 aa, Homo sapiens
KDKVEKEKSEKETTSKKNSHKKTRPRLKNVDRSSAQHLEVTVGDLTVIITDFKEKTKSPPASSAASADQHSQSGSSSDNT

SEQ ID NO: 325 - protein, 80 aa, Homo sapiens
GPLTFTDVAIKFSLEEWQFLDTAQQNLYRDVMLENYRNLVFLGVGVSKPDLITCLEQGKEPWNMKRHKMVAKPPVVCSHF

SEQ ID NO: 326 - protein, 80 aa, Homo sapiens
RKPNPQAMAALFLSAPPQAEVTFEDVAVYLSREEWGRLGPAQRGLYRDVMLETYGNLVSLGVGPAGPKPGVISQLERGDE

SEQ ID NO: 327 - protein, 80 aa, Homo sapiens
LSLSPILLYTCEMFQDPVAFKDVAVNFTQEEWALLDISQKNLYREVMLETFWNLTSIGKKWKDQNIEYEYQNPRRNFRSV

SEQ ID NO: 328 - protein, 80 aa, Homo sapiens
AAGEPRSLLFFQKPVTFEDVAVNFTQEEWDCLDASQRVLYQDVMSETFKNLTSVARIFLHKPELITKLEQEEEQWRETRV

SEQ ID NO: 329 - protein, 80 aa, Homo sapiens
AAMPLKAQYQEMVTFEDVAVHFTKTEWTGLSPAQRALYRSVMLENFGNLTALGYPVPKPALISLLERGDMAWGLEAQDDP

SEQ ID NO: 330 - protein, 80 aa, Homo sapiens
ARVPLTFSDVAIDFSQEEWEYLNSDQRDLYRDVMLENYTNLVSLDFNFTTESNKLSSEKRNYEVNAYHQETWKRNKTFNL

SEQ ID NO: 331 - protein, 80 aa, Homo sapiens
ASRLPTAWSCEPVTFEDVTLGFTPEEWGLLDLKQKSLYREVMLENYRNLVSVEHQLSKPDVVSQLEEAEDFWPVERGIPQ

SEQ ID NO: 332 - protein, 80 aa, Homo sapiens
SKKKRDAADKPRGFARGLDPERIIGATDSSGELMFLMKWKDSDEADLVLAKEANMKCPQIVIAFYEERLTWHSCPEDEAQ

SEQ ID NO: 333 - protein, 80 aa, Homo sapiens
AHKYVGLQYHGSVTFEDVAIAFSQQEWESLDSSQRGLYRDVMLENYRNLVSMGHSRSKPHVIALLEQWKEPEVTVRKDGR

SEQ ID NO: 334 - protein, 80 aa, Homo sapiens
AAARLLPVPAGPQPLSFQAKLTFEDVAVLLSQDEWDRLCPAQRGLYRNVMMETYGNVVSLGLPGSKPDIISQLERGEDPW

SEQ ID NO: 335 - protein, 80 aa, Homo sapiens
AVGLLKAMYQELVTFRDVAVDFSQEEWDCLDSSQRHLYSNVMLENYRILVSLGLCFSKPSVILLLEQGKAPWMVKRELTK

SEQ ID NO: 336 - protein, 80 aa, Homo sapiens
GLLTFRDVAIEFSLEEWQCLDTAQRNLYKNVILENYRNLVFLGIAVSKQDLITCLEQEKEPLTVKRHEMVNEPPVMCSHF

SEQ ID NO: 337 - protein, 80 aa, Homo sapiens
GLLAFRDVALEFSPEEWECLDPAQRSLYRDVMLENYRNLISLGEDSFNMQFLFHSLAMSKPELIICLEARKEPWNVNTEK

SEQ ID NO: 338 - protein, 80 aa, Homo sapiens
NLTEGRVVFEDVAIYFSQEEWGHLDEAQRLLYRDVMLENLALLSSLGSWHGAEDEEAPSQQGFSVGVSEVTASKPCLSSQ

SEQ ID NO: 339 - protein, 80 aa, Homo sapiens
GPAQHTSWPCGSAVPTLKSMVTFEDVAVYFSQEEWELLDAAQRHLYHSVMLENLELVTSLGSWHGVEGEGAHPKQNVSVE

SEQ ID NO: 340 - protein, 80 aa, Homo sapiens
SGYPGAERNLLEYSYFEKGPLTFRDVVIEFSQEEWQCLDTAQQDLYRKVMLENFRNLVFLGIDVSKPDLITCLEQGKDPW

SEQ ID NO: 341 - protein, 80 aa, Homo sapiens
ARKLVMFRDVAIDFSQEEWECLDSAQRDLYRDVMLENYSNLVSLDLPSRCASKDLSPEKNTYETELSQWEMSDRLENCDL

SEQ ID NO: 342 - protein, 80 aa, Homo sapiens
GPLQFRDVAIEFSLEEWHCLDTAQRNLYRNVMLENYSNLVFLGITVSKPDLITCLEQGRKPLTMKRNEMIAKPSVMCSHF

SEQ ID NO: 343 - protein, 80 aa, Homo sapiens
VAGWLTNYSQDSVTFEDVAVDFTQEEWTLLDQTQRNLYRDVMLENYKNLVAVDWESHINTKWSAPQQNFLQGKTSSVVEM

SEQ ID NO: 344 - protein, 80 aa, Homo sapiens
AAAWMAPAQESVTFEDVAVTFTQEEWGQLDVTQRALYVEVMLETCGLLVALGDSTKPETVEPIPSHLALPEEVSLQEQLA

SEQ ID NO: 345 - protein, 80 aa, Homo sapiens
VLEWLFISQEQPKITKSWGPLSFMDVFVDFTWEEWQLLDPAQKCLYRSVMLENYSNLVSLGYQHTKPDIIFKLEQGEELC

SEQ ID NO: 346 - protein, 80 aa, Homo sapiens
AAAVLMDRVQSCVTFEDVFVYFSREEWELLEEAQRFLYRDVMLENFALVATLGFWCEAEHEAPSEQSVSVEGVSQVRTAE

SEQ ID NO: 347 - protein, 80 aa, Homo sapiens
AGSQFPDFKHLGTFLVFEELVTFEDVLVDFSPEELSSLSAAQRNLYREVMLENYRNLVSLGHQFSKPDIISRLEEEESYA

SEQ ID NO: 348 - protein, 80 aa, Homo sapiens
IQSQISFEDVAVDFTLEEWQLLNPTQKNLYRDVMLENYSNLVFLEVWLDNPKMWLRDNQDNLKSMERGHKYDVFGKIFNS

SEQ ID NO: 349 - protein, 80 aa, Homo sapiens
DLVAFEDVAVNFTQEEWSLLDPSQKNLYREVMQETLRNLASIGEKWKDQNIEDQYKNPRNNLRSLLGERVDENTEENHCG

SEQ ID NO: 350 - protein, 80 aa, Homo sapiens
KDEDIKLRVIGQDSSEIHFKVKMTTPLKKLKKSYCQRQGVPVNSLRFLFEGQRIADNHTPEELGMEEEDVIEVYQEQIGG

SEQ ID NO: 351 - protein, 80 aa, Homo sapiens
DSVAFEDVAVNFTQEEWALLSPSQKNLYRDVTLETFRNLASVGIQWKDQDIENLYQNLGIKLRSLVERLCGRKEGNEHRE

SEQ ID NO: 352 - protein, 80 aa, Homo sapiens
RNFWILRLPPGSKGEAPKVPVTFDDVAVYFSELEWGKLEDWQKELYKHVMRGNYETLVSLDYAISKPDILTRIERGEEPC

SEQ ID NO: 353 - protein, 80 aa, Homo sapiens
AAAAPRRPTQQGTVTFEDVAVNFSQEEWCLLSEAQRCLYRDVMLENLALISSLGCWCGSKDEEAPCKQRISVQRESQSRT

SEQ ID NO: 354 - protein, 80 aa, Homo sapiens
SGEDSGSFYSWQKAKREQGLVTFEDVAVDFTQEEWQYLNPPQRTLYRDVMLETYSNLVFVGQQVTKPNLILKLEVEECPA

SEQ ID NO: 355 - protein, 80 aa, Homo sapiens
DSVAFEDVAVNFTQEEWALLGPSQKSLYRNVMQETIRNLDCIEMKWEDQNIGDQCQNAKRNLRSHTCEIKDDSQCGETFG

SEQ ID NO: 356 - protein, 80 aa, Homo sapiens
AAGWLTTWSQNSVTFQEVAVDFSQEEWALLDPAQKNLYKDVMLENFRNLASVGYQLCRHSLISKVDQEQLKTDERGILQG

SEQ ID NO: 357 - protein, 80 aa, Homo sapiens
ENPRNQLMALMLLTAQPQELVMFEEVSVCFTSEEWACLGPIQRALYWDVMLENYGNVTSLEWETMTENEEVTSKPSSSQR

SEQ ID NO: 358 - protein, 80 aa, Homo sapiens
LETYNSLVSLQELVSFEEVAVHFTWEEWQDLDDAQRTLYRDVMLETYSSLVSLGHCITKPEMIFKLEQGAEPWIVEETPN

SEQ ID NO: 359 - protein, 80 aa, Homo sapiens
RHFRRPEPCREPLASPIQDSVAFEDVAVNFTQEEWALLDSSQKNLYREVMQETCRNLASVGSQWKDQNIEDHFEKPGKDI

SEQ ID NO: 360 - protein, 80 aa, Homo sapiens
AAAELTAPAQGIVTFEDVAVYFSWKEWGLLDEAQKCLYHDVMLENLTLTTSLGGSGAGDEEAPYQQSTSPQRVSQVRIPK

SEQ ID NO: 361 - protein, 80 aa, Homo sapiens
AATFQLPGHQEMPLTFQDVAVYFSQAEGRQLGPQQRALYRDVMLENYGNVASLGFPVPKPELISQLEQGKELWVLNLLGA

SEQ ID NO: 362 - protein, 80 aa, Homo sapiens
RSEAGEPPSSLQVKPETPASAAVAVAAAAAPTTTAEKPPAEAQDEPAESLSEFKPFFGNIIITDVTANCLTVTFKEYVTV

SEQ ID NO: 363 - protein, 80 aa, Homo sapiens
HRTTRIKITELNPHLMCALCGGYFIDATTIVECLHSFCKTCIVRYLETNKYCPMCDVQVHKTRPLLSIRSDKTLQDIVYK

SEQ ID NO: 364 - protein, 80 aa, Homo sapiens
ASQEFEVEAIVDKRQDKNGNTQYLVRWKGYDKQDDTWEPEQHLMNCEKCVHDFNRRQTEKQKKLTWTTTSRIFSNNARRR

SEQ ID NO: 365 - protein, 80 aa, Homo sapiens
ASGDLYEVERIVDKRKNKKGKWEYLIRWKGYGSTEDTWEPEHHLLHCEEFIDEFNGLHMSKDKRIKSGKQSSTSKLLRDS

SEQ ID NO: 366 - protein, 80 aa, Homo sapiens
TLIRKADLENHNKDGGFWTVIDGKVYDIKDFQTQSLTGNSILAQFAGEDPVVALEAALQFEDTRESMHAFCVGQYLEPDQ

SEQ ID NO: 367 - protein, 80 aa, Homo sapiens
EKTKIGTMVEDHRSNSYQDSVTFDDVAVEFTPEEWALLDTTQKYLYRDVMLENYMNLASVDFFFCLTSEWEIQPRTKRSS

SEQ ID NO: 368 - protein, 80 aa, Homo sapiens
AHELVMFRDVAIDVSQEEWECLNPAQRNLYKEVMLENYSNLVSLGLSVSKPAVISSLEQGKEPWMVVREETGRWCPGTWK

SEQ ID NO: 369 - protein, 80 aa, Homo sapiens
AFEDVAVYFSQEEWGLLDTAQRALYRRVMLDNFALVASLGLSTSRPRVVIQLERGEEPWVPSGTDTTLSRTTYRRRNPGS

SEQ ID NO: 370 - protein, 80 aa, Homo sapiens
AQLRRGHLTFRDVAIEFSQEEWKCLDPVQKALYRDVMLENYRNLVSLGICLPDLSIISMMKQRTEPWTVENEMKVAKNPD

SEQ ID NO: 371 - protein, 80 aa, Homo sapiens
SDHSLGISRSKTPVDDPMSLLYNMNDCYSKLKELVPSIPQNKKVSKMEILQHVIDYILDLQIALDSHPTIVSLHHQRPGQ

SEQ ID NO: 372 - protein, 80 aa, Homo sapiens
KDPNEPQKPVSAYALFFRDTQAAIKGQNPNATFGEVSKIVASMWDGLGEEQKQVYKKKTEAAKKEYLKQLAAYRASLVSK

SEQ ID NO: 373 - protein, 80 aa, Homo sapiens
QEEKQEDAAICPVTVLPEEPVTFQDVAVDFSREEWGLLGPTQRTEYRDVMLETFGHLVSVGWETTLENKELAPNSDIPEE

SEQ ID NO: 374 - protein, 80 aa, Homo sapiens
DASRLSGRDPSSWTVEDVMQFVREADPQLGPHADLFRKHEIDGKALLLLRSDMMMKYMGLKLGPALKLSYHIDRLKQGKF

SEQ ID NO: 375 - protein, 80 aa, Homo sapiens
AVTFEDVTIIFTWEEWKFLDSSQKRLYREVMWENYTNVMSVENWNESYKSQEEKFRYLEYENFSYWQGWWNAGAQMYENQ

SEQ ID NO: 376 - protein, 80 aa, Homo sapiens
ELSAIGEQVFAVESIRKKRVRKGKVEYLVKWKGWPPKYSTWEPEEHILDPRLVMAYEEKEERDRASGYRKRGPKPKRLLL

SEQ ID NO: 377 - protein, 80 aa, Homo sapiens
GGAGARLPALLDEQQVNVLLYDMNGCYSRLKELVPTLPQNRKVSKVEILQHVIDYIRDLQLELNSESEVGTPGGRGLPVR

SEQ ID NO: 378 - protein, 80 aa, Homo sapiens
VVMAASPGSLHSPQQLAEEATRKRELRLMKNREAAKECRRRKKEYVKCLESRVAVLEVQNKKLIEELETLKDICSPKTDY

SEQ ID NO: 379 - protein, 80 aa, Homo sapiens
GGGPGGRPGREPRQRHTANARERDRTNSVNTAFTALRTLIPTEPADRKLSKIETLRLASSYISHLGNVLLAGEACGDGQP

SEQ ID NO: 380 - protein, 80 aa, Homo sapiens
SGFGYSLPQQQPAAVARRNERERNRVKLVNLGFATLREHVPNGAANKKMSKVETLRSAVEYIRALQQLLDEHDAVSAAFQ

SEQ ID NO: 381 - protein, 80 aa, Homo sapiens
APLPPRDPNGAGPEWREPGAVSFADVAVYFCREEWGCLRPAQRALYRDVMRETYGHLSALGIGGNKPALISWVEEEAELW

SEQ ID NO: 382 - protein, 80 aa, Homo sapiens
KQGFSKDPSTWSVDEVIQFMKHTDPQISGPLADLFRQHEIDGKALFLLKSDVMMKYMGLKLGPALKLCYYIEKLKEGKYS

SEQ ID NO: 383 - protein, 80 aa, Homo sapiens
SGGGSPQSYEELQTQRVMANVRERQRTQSLNEAFAALRKIIPTLPSDKLSKIQTLKLAARYIDFLYQVLQSDELDSKMAS

SEQ ID NO: 384 - protein, 80 aa, Homo sapiens
IAPGVVMASSPALPTQPAEEAARKREVRLMKNREAARECRRKKKEYVKCLENRVAVLENQNKTLIEELKALKDLYCHKSD

SEQ ID NO: 385 - protein, 80 aa, Homo sapiens
SRIPVSKSQPVTPEKHRARKRQAWLWEEDKNLRSGVRKYGEGNWSKILLHYKFNNRTSVMLKDRWRTMKKLKLISSDSED

SEQ ID NO: 386 - protein, 80 aa, Homo sapiens
SLAIARGRGKGPAAEEPLSLLDDMNHCYSRLRELVPGVPRGTQLSQVEILQRVIDYILDLQVVLAEPAPGPPDGPHLPIQ

SEQ ID NO: 387 - protein, 80 aa, Homo sapiens
GSGPPSSGGGLYRDMGAQGGRPSLIARIPVARILGDPEEESWSPSLTNLEKVVVTDVTSNFLTVTIKESNTDQGFFKEKR

SEQ ID NO: 388 - protein, 80 aa, Homo sapiens
ELPAVGEHVFAVESIEKKRIRKGRVEYLVKWRGWSPKYNTWEPEENILDPRLLIAFQNRERQEQLMGYRKRGPKPKPLVV

SEQ ID NO: 389 - protein, 80 aa, Homo sapiens
VDSSSNQLPSSKRMRTAFTSTQLLELEREFASNMYLSRLRRIEIATYLNLSEKQVKIWFQNRRVKHKKEGKGSNHRGGGG

SEQ ID NO: 390 - protein, 80 aa, Homo sapiens
TPGGGGDAGKKRKRRVLFSKAQTYELERRFRQQRYLSAPEREHLASLIRLTPTQVKIWFQNHRYKMKRARAEKGMEVTPL

SEQ ID NO: 391 - protein, 80 aa, Homo sapiens
QTVVMTSPVTLTSQTTKTDDPQLKREIRLMKNREAARECRRKKKEYVKCLENRVAVLENQNKTLIEELKTLKDLYSNKSV

SEQ ID NO: 392 - protein, 80 aa, Homo sapiens
KGSPSAQSFEELQSQRILANVRERQRTQSLNEAFAALRKIIPTLPSDKLSKIQTLKLAARYIDFLYQVLQSDEMDNKMTS

SEQ ID NO: 393 - protein, 80 aa, Homo sapiens
NLTEDYMVFEDVAIHFSQEEWGILNDVQRHLHSDVMLENFALLSSVGCWHGAKDEEAPSKQCVSVGVSQVTTLKPALSTQ

SEQ ID NO: 394 - protein, 80 aa, Homo sapiens
KDPNEPQKPVSAYALFFRDTQAAIKGQNPNATFGEVSKIVASMWDSLGEEQKQVYKRKTEAAKKEYLKALAAYRASLVSK

SEQ ID NO: 395 - protein, 80 aa, Homo sapiens
KDPNEPQKPVSAYALFFRDTQAAIKGQNPNATFGEVSKIVASMWDSLGEEQKQVYKRKTEAAKKEYLKALAAYKDNQECQ

SEQ ID NO: 396 - protein, 80 aa, Homo sapiens
LDGSTWDFCSEDCKSKYLLWYCKAARCHACKRQGKLLETIHWRGQIRHFCNQQCLLRFYSQQNQPNLDTQSGPESLLNSQ

SEQ ID NO: 397 - protein, 80 aa, Homo sapiens
ASVQASRRQWCYLCDLPKMPWAMVWDFSEAVCRGCVNFEGADRIELLIDAARQLKRSHVLPEGRSPGPPALKHPATKDLA

SEQ ID NO: 398 - protein, 80 aa, Homo sapiens
MEGPQPENMQPRTRRTKFTLLQVEELESVFRHTQYPDVPTRRELAENLGVTEDKVRVWFKNKRARCRRHQRELMLANELR

SEQ ID NO: 399 - protein, 80 aa, Homo sapiens
PKIMPKKPAEEGNDSEEVPEASGPQNDGKELCPPGKPTTSEKIHERSGPKRGEHAWTHRLRERKQLVIYEEISDPEEDDE

SEQ ID NO: 400 - protein, 80 aa, Homo sapiens
SAAQVSSSRRQSCYLCDLPRMPWAMIWDFSEPVCRGCVNYEGADRIEFVIETARQLKRAHGCFQDGRSPGPPPPVGVKTV

SEQ ID NO: 401 - protein, 80 aa, Homo sapiens
PGPPGSLEMGPLTFRDVAIEFSLEEWQCLDTAQRNLYRKVMFENYRNLVFLGIAVSKPHLITCLEQGKEPWNRKRQEMVA

SEQ ID NO: 402 - protein, 80 aa, Homo sapiens
NKKKVEEVLEEEEEEYVVEKVLDRRVVKGKVEYLLKWKGFSDEDNTWEPEENLDCPDLIAEFLQSQKTAHETDKSEGGKR

SEQ ID NO: 403 - protein, 80 aa, Homo sapiens
LANVVEKVRLLRLHPGMGLKGDLCERHGEKLKMFCKEDVLIMCEACSQSPEHEAHSVVPMEDVAWEYKWELHEALEHLKK

SEQ ID NO: 404 - protein, 80 aa, Homo sapiens [sequence omitted]

SEQ ID NO: 405 - protein, 80 aa, Homo sapiens
ENSDLLPVAQTEPSIWTVDDVWAFIHSLPGCQDIADEFRAQEIDGQALLLLKEDHLMSAMNIKLGPALKICARINSLKES

SEQ ID NO: 406 - protein, 80 aa, Homo sapiens
AGPGGGSRSGSGRPAAANAARERSRVQTLRHAFLELQRTLPSVPPDTKLSKLDVLLLATTYIAHLTRSLQDDAEAPADAG

SEQ ID NO: 407 - protein, 80 aa, Homo sapiens
QNGKSKKVEEAEPEEFVVEKVLDRRVVNGKVEYFLKWKGFTDADNTWEPEENLDCPELIEAFLNSQKAGKEKDGTKRKSL

SEQ ID NO: 408 - protein, 80 aa, Homo sapiens
QHPPDACAFRRGRKKRIPYSKGQLRELEREYAANKFITKDKRRKISAATSLSERQITIWFQNRRVKEKKVLAKVKNSATP

SEQ ID NO: 409 - protein, 80 aa, Homo sapiens
SMSPTTSSQILARKRRRGIIEKRRRDRINNSLSELRRLVPSAFEKQGSAKLEKAEILQMTVDHLKMLHTAGGKGYFDAHA

SEQ ID NO: 410 - protein, 80 aa, Homo sapiens
LVGMGHHFLPSEPTKWNVEDVYEFIRSLPGCQEIAEEFRAQEIDGQALLLLKEDHLMSAMNIKLGPALKIYARISMLKDS

SEQ ID NO: 411 - protein, 80 aa, Homo sapiens
PANEDAPQPGEHGSACEVSVSFEDVTVDFSREEWQQLDSTQRRLYQDVMLENYSHLLSVGFEVPKPEVIFKLEQGEGPWT

SEQ ID NO: 412 - protein, 80 aa, Homo sapiens
GYSSTENLQLVLERRRVANAKERERIKNLNRGFARLKALVPFLPQSRKPSKVDILKGATEYIQVLSDLLEGAKDSKKQDP

SEQ ID NO: 413 - protein, 80 aa, Homo sapiens
EEAPAPEDVTKWTVDDVCSFVGGLSGCGEYTRVFREQGIDGETLPLLTEEHLLTNMGLKLGPALKIRAQVARRLGRVFYV

SEQ ID NO: 414 - protein, 80 aa, Homo sapiens
GGTLAHTPRRSLPSHHGKKMRMARCGHCRGCLRVQDCGSCVNCLDKPKFGGPNTKKQCCVYRKCDKIEARKMERLAKKGR

SEQ ID NO: 415 - protein, 80 aa, Homo sapiens
LNSPTTTSQIMARKKRRGIIEKRRRDRINNSLSELRRLVPTAFEKQGSAKLEKAEILQMTVDHLKMLQATGGKGYFDAHA

SEQ ID NO: 416 - protein, 80 aa, Homo sapiens
QPVKSELDEEEERRKRRREKNKVAAARCRNKKKERTEFLQRESERLELMNAELKTQIEELKQERQQLILMLNRHRPTCIV

SEQ ID NO: 417 - protein, 80 aa, Homo sapiens
LQPEVSSYRRGRKKRVPYTKVQLKELEKEYAASKFITKEKRRRISATTNLSERQVTIWFQNRRVKEKKVVSKSKAPHLHS

SEQ ID NO: 418 - protein, 80 aa, Homo sapiens
LPVPLDSAFEPAFLRKRNERERQRVRCVNEGYARLRDHLPRELADKRLSKVETLRAAIDYIKHLQELLERQAWGLEGAAG

SEQ ID NO: 419 - protein, 80 aa, Homo sapiens
SPFLQRPLHKRKGGQVRFSNDQTIELEKKFETQKYLSPPERKRLAKMLQLSERQVKTWFQNRRAKWRRLKQENPQSNKKE

SEQ ID NO: 420 - protein, 80 aa, Homo sapiens
IAIATGSLHCVCCTEDGEVYTWGDNDEGQLGDGTTNAIQRPRLVAALQGKKVNRVACGSAHTLAWSTSKPASAGKLPAQV

SEQ ID NO: 421 - protein, 80 aa, Homo sapiens
GGSDASQVPNGKRMRTAFTSTQLLELEREFSSNMYLSRLRRIEIATYLNLSEKQVKIWFQNRRVKHKKEGKGTQRNSHAG

SEQ ID NO: 422 - protein, 80 aa, Homo sapiens
RLDLPPGFMFKVQAQHDYTATDTDELQLKAGDVVLVIPFQNPEEQDEGWLMGVKESDWNQHKELEKCRGVFPENFTERVP

SEQ ID NO: 423 - protein, 80 aa, Homo sapiens
GICKLPGRLRIQPALWSREDVLHWLRWAEQEYSLPCTAEHGFEMNGRALCILTKDDFRHRAPSSGDVLYELLQYIKTQRR

SEQ ID NO: 424 - protein, 80 aa, Homo sapiens
PNYRGCEYSYGPAFTRKRNERERQRVKCVNEGYAQLRHHLPEEYLEKRLSKVETLRAAIKYINYLQSLLYPDKAETKNNP

SEQ ID NO: 425 - protein, 80 aa, Homo sapiens
LHGINPVFLSSNPSRWSVEEVYEFIASLQGCQEIAEEFRSQEIDGQALLLLKEEHLMSAMNIKLGPALKICAKINVLKET

SEQ ID NO: 426 - protein, 80 aa, Homo sapiens
QAGQQQGQQKQKRHRTRFTPAQLNELERSFAKTHYPDIFMREELALRIGLTESRVQVWFQNRRAKWKKRKKTTNVFRAPG

SEQ ID NO: 427 - protein, 80 aa, Homo sapiens
AAAVAVAAASRRQSCYLCDLPRMPWAMIWDFTEPVCRGCVNYEGADRVEFVIETARQLKRAHGCFPEGRSPPGAAASAAA

SEQ ID NO: 428 - protein, 80 aa, Homo sapiens
FSSQTPASIKEEEGSPEKERPPEAEYINSRCVLFTYFQGDISSVVDEHFSRALSQPSSYSPSCTSSKAPRSSGPWRDCSF

SEQ ID NO: 429 - protein, 80 aa, Homo sapiens
DKAGGSSGQRTRKKRCPYTKYQIRELEREFFFSVYINKEKRLQLSRMLNLTDRQVKIWFQNRRMKEKKINRDRLQYYSAN

SEQ ID NO: 430 - protein, 80 aa, Homo sapiens
GAPLSGLQGLPECTRCGHGIVGTIVKARDKLYHPECFMCSDCGLNLKQRGYFFLDERLYCESHAKARVKPPEGYDVVAVY

SEQ ID NO: 431 - protein, 80 aa, Homo sapiens
RRPATAETGGGAAAVARRNERERNRVKLVNLGFQALRQHVPHGGASKKLSKVETLRSAVEYIRALQRLLAEHDAVRNALA

SEQ ID NO: 432 - protein, 80 aa, Homo sapiens
TVQVTGKTRTKEKYRVVYTDHQRLELEKEFHCNRYITIQRKSELAVNLGLSERQVKIWFQNRRAKERKMIKKKISQFENS

SEQ ID NO: 433 - protein, 80 aa, Homo sapiens
EEAAQKRKEKEPGMALPQGHLTFRDVAIEFSLEEWKCLDPTQRALYRAMMLENYRNLHSVDISSKCMMKKFSSTAQGNTE

SEQ ID NO: 434 - protein, 80 aa, Homo sapiens
DIRASQVARWTVDEVAEFVQSLLGCEEHAKCFKKEQIDGKAFLLLTQTDIVKVMKIKLGPALKIYNSILMFRHSQELPEE

SEQ ID NO: 435 - protein, 80 aa, Homo sapiens
LSPLEGTKMTVNNLHPRVTEEDIVELFCVCGALKRARLVHPGVAEVVFVKKDDAITAYKKYNNRCLDGQPMKCNLHMNGN

SEQ ID NO: 436 - protein, 80 aa, Homo sapiens
DNAERPRARRRRKPRVLFSQAQVYELERRFKQQRYLSAPERDQLASVLKLTSTQVKIWFQNRRYKCKRQRQDQTLELVGL

SEQ ID NO: 437 - protein, 80 aa, Homo sapiens
SQVKSKAKKTVDKHSDEYKIRRERNNIAVRKSRDKAKMRNLETQHKVLELTAENERLQKKVEQLSRELSTLRNLFKQLPE

SEQ ID NO: 438 - protein, 80 aa, Homo sapiens
KRDYIRLYGIKCAKCSIGFSKNDFVMRARSKVYHIECFRCVACSRQLIPGDEFALREDGLFCRADHDVVERASLGAGDPL

SEQ ID NO: 439 - protein, 80 aa, Homo sapiens
SLGSQVKTRTKDKYRVVYTDHQRLELEKEFHYSRYITIRRKAELAATLGLSERQVKIWFQNRRAKERKINKKKLQQQQQQ

SEQ ID NO: 440 - protein, 80 aa, Homo sapiens
QGGQRGRPHSRRRHRTTFSPVQLEQLESAFGRNQYPDIWARESLARDTGLSEARIQVWFQNRRAKQRKQERSLLQPLAHL

SEQ ID NO: 441 - protein, 80 aa, Homo sapiens
DALTYLDQVKIRFGSDPATYNGFLEIMKEFKSQSIDTPGVIRRVSQLFHEHPDLIVGFNAFLPLGYRIDIPKNGKLNIQS

SEQ ID NO: 442 - protein, 80 aa, Homo sapiens
RLHLDSNPLKWSVADVVRFIRSTDCAPLARIFLDQEIDGQALLLLTLPTVQECMDLKLGPAIKLCHHIERIKFAFYEQFA

SEQ ID NO: 443 - protein, 80 aa, Homo sapiens
AKGAAPNAPRTRKKRCPYSKFQIRELEREFFFNVYINKEKRLQLSRMLNLTDRQVKIWFQNRRMKEKKLSRDRLQYFSGN

SEQ ID NO: 444 - protein, 80 aa, Homo sapiens
TTGNWLTAKSGRKKRCPYTKHQTLELEKEFLFNMYLTRERRLEISKTINLTDRQVKIWFQNRRMKLKKMNRENRIRELTS

SEQ ID NO: 445 - protein, 80 aa, Homo sapiens
YLVSNVIELLDVDPNDQEEDGANIDLDSQRKGKCAVIKTSTRQTYFLPVIGLVDAEKLKPGDLVGVNKDSYLILETLPTE

SEQ ID NO: 446 - protein, 80 aa, Homo sapiens
KASPTLGKRKKRRHRTVFTAHQLEELEKAFSEAHYPDVYAREMLAVKTELPEDRIQVWFQNRRAKWRKREKRWGGSSVMA

SEQ ID NO: 447 - protein, 80 aa, Homo sapiens
EESERPKPRSRRKPRVLFSQAQVFELERRFKQQRYLSAPEREHLASSLKLTSTQVKIWFQNRRYKCKRQRQDKSLELGAH

SEQ ID NO: 448 - protein, 80 aa, Homo sapiens
VVPGSRQEEVIDHKLTEREWAEEWKHLNNLLNCIMDMVEKTRRSLTVLRRCQEADREELNHWARRYSDAEDTKKGPAPAA

SEQ ID NO: 449 - protein, 80 aa, Homo sapiens
ESPEKKPACRKKKTRTVFSRSQVFQLESTFDMKRYLSSSERAGLAASLHLTETQVKIWFQNRRNKWKRQLAAELEAANLS

SEQ ID NO: 450 - protein, 80 aa, Homo sapiens
RGGVGVGGGRKKKTRTVFSRSQVFQLESTFDLKRYLSSAERAGLAASLQLTETQVKIWFQNRRNKWKRQLAAELEAASLS

SEQ ID NO: 451 - protein, 80 aa, Homo sapiens
ELLAHGRQKILDLLNEGSARDLRSLQRIGPKKAQLIVGWRELHGPFSQVEDLERVEGITGKQMESFLKANILGLAAGQRC

SEQ ID NO: 452 - protein, 80 aa, Homo sapiens
ESPYGETISPEDAPESISKAVASLPPEQMFELMKQMKLCVQNSPQEARNMLLQNPQLAYALLQAQVVMRIVDPEIALKIL

SEQ ID NO: 453 - protein, 80 aa, Homo sapiens
AGPLHKGKKAVNKDSLEYRLRRERNNIAVRKSRDKAKRRILETQQKVLEYMAENERLRSRVEQLTQELDTLRNLFRQIPE

SEQ ID NO: 454 - protein, 80 aa, Homo sapiens
IRIVNGKPKKVRKPRTIYSSFQLAALQRRFQKTQYLALPERAELAASLGLTQTQVKIWFQNRRSKFKKMWKSGEIPSEQH

SEQ ID NO: 455 - protein, 80 aa, Homo sapiens
TVYQFCSPSCWTKFQRTSPEGGIHLSCHYCHSLFSGKPEVLDWQDQVFQFCCRDCCEDFKRLRGVVSQCEHCRQEKLLHE

SEQ ID NO: 456 - protein, 80 aa, Homo sapiens
TMVDTEMPFWPTNFGISSVDLSVMEDHSHSFDIKPFTTVDFSSISTPHYEDIPFTRTDPVVADYKYDLKLQEYQSAIKVE

SEQ ID NO: 457 - protein, 80 aa, Homo sapiens
GRHHAELLKPRCSACDEIIFADECTEAEGRHWHMKHFCCLECETVLGGQRYIMKDGRPFCCGCFESLYAEYCETCGEHIG

SEQ ID NO: 458 - protein, 80 aa, Homo sapiens
DPDKESPGCKRRRTRTNFTGWQLEELEKAFNESHYPDVFMREALALRLDLVESRVQVWFQNRRAKWRKKENTKKGPGRPA

SEQ ID NO: 459 - protein, 80 aa, Homo sapiens
TEQPTPRQKKPRRSRTIFTELQLMGLEKKFQKQKYLSTPDRLDLAQSLGLTQLQVKTWYQNRRMKWKKMVLKGGQEAPTK

SEQ ID NO: 460 - protein, 80 aa, Homo sapiens
SMELAKNKSKKRRNRTTFSTFQLEELEKVFQKTHYPDVYAREQLALRTDLTEARVQVWFQNRRAKWRKRERYGKIQEGRN

SEQ ID NO: 461 - protein, 80 aa, Homo sapiens
GGGGGAGPVVVVRQRQAANARERDRTQSVNTAFTALRTLIPTEPVDRKLSKIETVRLASSYIAHLANVLLLGDSADDGQP

SEQ ID NO: 462 - protein, 80 aa, Homo sapiens
IDDTVEGITGNLFEVYLKPYFLEAYRPIRKGDIFLVRGGMRAVEFKVVETDPSPYCIVAPDTVIHCEGEPIKREDEEESL

SEQ ID NO: 463 - protein, 80 aa, Homo sapiens
SALNQTKKRKKRRHRTIFTSYQLEELEKAFNEAHYPDVYAREMLAMKTELPEDRIQVWFQNRRAKWRKREKCWGRSSVMA

SEQ ID NO: 464 - protein, 80 aa, Homo sapiens
DGLPWGAAPGRARKKRKPYTKQQIAELENEFLVNEFINRQKRKELSNRLNLSDQQVKIWFQNRRMKKKRVVLREQALALY

SEQ ID NO: 465 - protein, 80 aa, Homo sapiens
GGGGSGKTRTKDKYRVVYTDHQRLELEKEFHYSRYITIRRKSELAANLGLTERQVKIWFQNRRAKERKVNKKKQQQQQPP

SEQ ID NO: 466 - protein, 80 aa, Homo sapiens
TRAGGLALGRSEASPENAARERSRVRTLRQAFLALQAALPAVPPDTKLSKLDVLVLAASYIAHLTRTLGHELPGPAWPPF

SEQ ID NO: 467 - protein, 80 aa, Homo sapiens
KCDSNVSSSKKRRHRTTFTSLQLEELEKVFQKTHYPDVYVREQLALRTELTEARVQVWFQNRRAKWRKRERYGQIQQAKS

SEQ ID NO: 468 - protein, 80 aa, Homo sapiens
NAANWLTAKSGRKKRCPYTKHQTLELEKEFLFNMYLTRERRLEISRSVHLTDRQVKIWFQNRRMKLKKMNRENRIRELTA

SEQ ID NO: 469 - protein, 80 aa, Homo sapiens
LSEEEQPKKKHRRNRTTFTTYQLHELERAFEKSHYPDVYSREELAGKVNLPEVRVQVWFQNRRAKWRRQEKLEVSSMKLQ

SEQ ID NO: 470 - protein, 80 aa, Homo sapiens
HMAGLAEYPMQGELASAISSGKKKRKRCGMCAPCRRRINCEQCSSCRNRKTGHQICKFRKCEELKKKPSAALEKVMLPTG

SEQ ID NO: 471 - protein, 80 aa, Homo sapiens
SITKHPSTWSVEAVVLFLKQTDPLALCPLVDLFRSHEIDGKALLLLTSDVLLKHLGVKLGTAVKLCYYIDRLKQGKCFEN

SEQ ID NO: 472 - protein, 80 aa, Homo sapiens
ACRRKREFIPDEKKDAMYWEKRRKNNEAAKRSREKRRLNDLVLENKLIALGEENATLKAELLSLKLKFGLISSTAYAQEI

SEQ ID NO: 473 - protein, 80 aa, Homo sapiens
EIRFNGKGKKIRKPRTIYSSLQLQALNHRFQQTQYLALPERAELAASLGLTQTQVKIWFQNKRSKFKKLLKQGSNPHESD

SEQ ID NO: 474 - protein, 80 aa, Homo sapiens
GLHGTRQEEMIDHRLTDREWAEEWKHLDHLLNCIMDMVEKTRRSLTVLRRCQEADREELNYWIRRYSDAEDLKKGGGSSS

SEQ ID NO: 475 - protein, 80 aa, Homo sapiens
ELSAVGERVFAAEALLKRRIRKGRMEYLVKWKGWSQKYSTWEPEENILDARLLAAFEEREREMELYGPKKRGPKPKTFLL

SEQ ID NO: 476 - protein, 80 aa, Homo sapiens
AREKSAGKRGPDRGSPEYRQRRERNNIAVRKSRDKAKRRNQEMQQKLVELSAENEKLHQRVEQLTRDLAGLRQFFKQLPS

SEQ ID NO: 477 - protein, 80 aa, Homo sapiens
SGGCDNLIKLWKEEEDGQWKEEQKLEAHSDWVRDVAWAPSIGLPTSTIASCSQDGRVFIWTCDDASSNTWSPKLLHKFND

SEQ ID NO: 478 - protein, 80 aa, Homo sapiens
VKGVDLDAPGSINGVPLLEVDLDSFEDKPWRKPGADLSDYFNYGFNEDTWKAYCEKQKRIRMGLEVIPVTSTTNKITAED

SEQ ID NO: 479 - protein, 80 aa, Homo sapiens
KADSESNKGKKRRNRTTFTSYQLEELEKVFQKTHYPDVYAREQLAMRTDLTEARVQVWFQNRRAKWRKRERFGQMQQVRT

SEQ ID NO: 480 - protein, 80 aa, Homo sapiens
TAKQREAEATAKRPRTTITAKQLETLKSAYNTSPKPARHVREQLSSETGLDMRVVQVWFQNRRAKEKRLKKDAGRQRWGQ

SEQ ID NO: 481 - protein, 80 aa, Homo sapiens
GRHHAECLKPRCAACDEIIFADECTEAEGRHWHMKHFCCFECETVLGGQRYIMKEGRPYCCHCFESLYAEYCDTCAQHIG

SEQ ID NO: 482 - protein, 80 aa, Homo sapiens
IIGGDRPDEFLQVKNVLKDGPAAQDGKIAPGDVIVDINGNCVLGHTHADVVQMFQLVPVNQYVNLTLCRGYPLPDDSEDP

SEQ ID NO: 483 - protein, 80 aa, Homo sapiens
CCPECDTRVTSQCLDQNGHKLYRSGDNWTHSCQQCRCLEGEVDCWPLTCPNLSCEYTAILEGECCPRCVSDPCLADNITY

SEQ ID NO: 484 - protein, 80 aa, Homo sapiens
LNSEEKKKRKQRRNRTTFNSSQLQALERVFERTHYPDAFVREDLARRVNLTEARVQVWFQNRRAKFRRNERAMLANKNAS

SEQ ID NO: 485 - protein, 80 aa, Homo sapiens
GLNGGYQDELVDHRLTEREWADEWKHLDHALNCIMEMVEKTRRSMAVLRRCQESDREELNYWKRRYNENTELRKTGTELV

SEQ ID NO: 486 - protein, 80 aa, Homo sapiens
GPGEEAPKKKHRRNRTTFTTYQLHQLERAFEASHYPDVYSREELAAKVHLPEVRVQVWFQNRRAKWRRQERLESGSGAVA

SEQ ID NO: 487 - protein, 80 aa, Homo sapiens
VRMVNGKPKKVRKPRTIYSSYQLAALQRRFQKAQYLALPERAELAAQLGLTQTQVKIWFQNRRSKFKKLYKNGEVPLEHS

SEQ ID NO: 488 - protein, 80 aa, Homo sapiens
EVRFNGKGKKIRKPRTIYSSLQLQALNRRFQQTQYLALPERAELAASLGLTQTQVKIWFQNKRSKFKKLMKQGGAALEGS

SEQ ID NO: 489 - protein, 80 aa, Homo sapiens
GRSEQPKARQRRKPRVLFSQAQVLALERRFKQQRYLSAPEREHLASALQLTSTQVKIWFQNRRYKCKRQRQDKSLELAGH

SEQ ID NO: 490 - protein, 80 aa, Homo sapiens
LPRTLGELQLYRILQKANLLSYFDAFIQQGGDDVQQLCEAGEEEFLEIMALVGMASKPLHVRRLQKALRDWVTNPGLFNQ

SEQ ID NO: 491 - protein, 80 aa, Homo sapiens
NLSLDEDIQKWTVDDVHSFIRSLPGCSDYAQVFKDHAIDGETLPLLTEEHLRGTMGLKLGPALKIQSQVSQHVGSMFYKK

SEQ ID NO: 492 - protein, 80 aa, Homo sapiens
SPEDGSLKKKQRRQRTHFTSQQLQELEATFQRNRYPDMSTREEIAVWTNLTEARVRVWFKNRRAKWRKRERSQQAELCKG

SEQ ID NO: 493 - protein, 80 aa, Homo sapiens
SNLLVSASDDKTLKIWDVSSGKCLKTLKGHSNYVFCCNFNPQSNLIVSGSFDESVRIWDVKTGKCLKTLPAHSDPVSAVH

SEQ ID NO: 494 - protein, 80 aa, Homo sapiens
GNYKSEVNSKPRKERTAFTKEQIRELEAEFAHHNYLTRLRRYEIAVNLDLTERQVKVWFQNRRMKWKRVKGGQQGAAARE

SEQ ID NO: 495 - protein, 80 aa, Homo sapiens
LPRTLGELQLYRVLQRANLLSYYETFIQQGGDDVQQLCEAGEEEFLEIMALVGMATKPLHVRRLQKALREWATNPGLFSQ

SEQ ID NO: 496 - protein, 80 aa, Homo sapiens
PEEPTIGDIYNGKVTSIMQFGCFVQLEGLRKRWEGLVHISELRREGRVANVADVVSKGQRVKVKVLSFTGTKTSLSMKDV

SEQ ID NO: 497 - protein, 80 aa, Homo sapiens
YAFNHPFSINNLMSSEQQHHHSHHHHQPHKMDLKAYEQVMHYPGYGSPMPGSLAMGPVTNKTGLDASPLAADTSYYQGVY

SEQ ID NO: 498 - protein, 80 aa, Homo sapiens
TAAAGPAPPTAPEPAGASSEPEAGDWRPEMSPCSNVVVTDVTSNLLTVTIKEFCNPEDFEKVAAGVAGAAGGGGSIGASK

SEQ ID NO: 499 - protein, 80 aa, Homo sapiens
FLLHNALARKPKRIRTAFSPSQLLRLEHAFEKNHYVVGAERKQLAHSLSLTETQVKVWFQNRRTKFKRQKLEEEGSDSQQ

SEQ ID NO: 500 - protein, 80 aa, Homo sapiens
KRIALYIGNLTWWTTDEDLTEAVHSLGVNDILEIKFFENRANGQSKGFALVGVGSEASSKKLMDLLPKRELHGQNPVVTP

SEQ ID NO: 501 - protein, 80 aa, Homo sapiens
SGAPWYPINSRSRKKRKPYSKLQLAELEGEFLVNEFITRQRRRELSDRLNLSDQQVKIWFQNRRMKKKRLLLREQALSFF

SEQ ID NO: 502 - protein, 80 aa, Homo sapiens
SDNLYPESITSRDCVQLGPPSEGELVELRWTDGNLYKAKFISSVTSHIYQVEFEDGSQLTVKRGDIFTLEEELPKRVRSR

SEQ ID NO: 503 - protein, 80 aa, Homo sapiens
GIPASKVSKWSTDEVSEFIQSLPGCEEHGKVFKDEQIDGEAFLLMTQTDIVKIMSIKLGPALKIFNSILMFKAAEKNSHN

SEQ ID NO: 504 - protein, 80 aa, Homo sapiens
EPSGLHEKRKQRRIRTTFTSAQLKELERVFAETHYPDIYTREELALKIDLTEARVQVWFQNRRAKFRKQERAASAKGAAG

SEQ ID NO: 505 - protein, 80 aa, Homo sapiens
LLLHGPFARKPKRIRTAFSPSQLLRLERAFEKNHYVVGAERKQLAGSLSLSETQVKVWFQNRRTKYKRQKLEEEGPESEQ

SEQ ID NO: 506 - protein, 80 aa, Homo sapiens
SSGNDDDLTIPRAAINKMIKETLPNVRVANDARELVVNCCTEFIHLISSEANEICNKSEKKTISPEHVIQALESLGFGSY

SEQ ID NO: 507 - protein, 80 aa, Homo sapiens
ERRPQAPAKKLRKPRTIYSSLQLQHLNQRFQHTQYLALPERAQLAAQLGLTQTQVKIWFQNKRSKYKKLLKQNSGGQEGD

SEQ ID NO: 508 - protein, 80 aa, Homo sapiens
NVQDRVKRPMNAFIVWSRDQRRKMALENPRMRNSEISKQLGYQWKMLTEAEKWPFFQEAQKLQAMHREKYPNYKYRPRRK

SEQ ID NO: 509 - protein, 80 aa, Homo sapiens
EITRLAVWAAVQAVERKLEAQAMRLLTLEGRTGTNEKKIADCEKTAVEFANHLESKWVVLGTLLQEYGLLQRRLENMENL

SEQ ID NO: 510 - protein, 80 aa, Homo sapiens
CEKDIDECSEGIIECHNHSRCVNLPGWYHCECRSGFHDDGTYSLSGESCIDIDECALRTHTCWNDSACINLAGGFDCLCP

SEQ ID NO: 511 - protein, 80 aa, Homo sapiens
AAISLWTVVAAVQAIERKVEIHSRRLLHLEGRTGTAEKKLASCEKTVTELGNQLEGKWAVLGTLLQEYGLLQRRLENLEN

SEQ ID NO: 512 - protein, 80 aa, Homo sapiens
GQNRPLIKPKRRLSAARRAGTSCANCQTTTTTLWRRNANGDPVCNACGLYYKLHNINRPLTMKKEGIQTRNRKMSSKSKK

SEQ ID NO: 513 - protein, 80 aa, Homo sapiens
HAELPGKHCRRRKARTVFSDSQLSGLEKRFEIQRYLSTPERVELATALSLSETQVKTWFQNRRMKHKKQLRKSQDEPKAP

SEQ ID NO: 514 - protein, 80 aa, Homo sapiens
QDATVYVGGLDEKVSEPLLWELFLQAGPVVNTHMPKDRVTGQHQGYGFVEFLSEEDADYAIKIMNMIKLYGKPIRVNKAS

SEQ ID NO: 515 - protein, 80 aa, Homo sapiens
PIDNDAEGVWSPDIEQSFQEALAIYPPCGRRKIILSDEGKMYGRNELIARYIKLRTGKTRTRKQVSSHIQVLARRKSRDF

SEQ ID NO: 516 - protein, 80 aa, Homo sapiens
GLDNDAEGVWSPDIEQSFQEALAIYPPCGRRKIILSDEGKMYGRNELIARYIKLRTGKTRTRKQVSSHIQVLARKKVREY

SEQ ID NO: 517 - protein, 80 aa, Homo sapiens
DSVGTPQSNGGMRLHDFVSKTVIKPESCVPCGKRIKFGKLSLKCRDCRVVSHPECRDRCPLPCIPTLIGTPVKIGEGMLA

SEQ ID NO: 518 - protein, 80 aa, Homo sapiens
SAPHSMTASSSSVSSPSPGLPRRSAPPSPLCRSLSPGTGGGVRGGVGYLSRGDPVRVLARRVRPDGSVQYLVEWGGGGIF

SEQ ID NO: 519 - protein, 80 aa, Homo sapiens
GDPHYSFNHPFSINNLMSSSEQQHKLDFKAYEQALQYSPYGSTLPASLPLGSASVTTRSPIEPSALEPAYYQGVYSRPVL

SEQ ID NO: 520 - protein, 80 aa, Homo sapiens
GQNRPLIKPKRRLSAARRAGTCCANCQTTTTTLWRRNANGDPVCNACGLYYKLHNVNRPLTMKKEGIQTRNRKMSNKSKK

SEQ ID NO: 521 - protein, 80 aa, Homo sapiens
DSLSGSSLYSTSANLPVMGHEKFPSDLDLDMFNGSLECDMESIIRSELMDADGLDFNFDSLISTQNVVGLNVGNFTGAKQ

SEQ ID NO: 522 - protein, 80 aa, Homo sapiens
TEISLWTVVAAIQAVEKKMESQAARLQSLEGRTGTAEKKLADCEKMAVEFGNQLEGKWAVLGTLLQEYGLLQRRLENVEN

SEQ ID NO: 523 - protein, 80 aa, Homo sapiens
MDSGTRRKNATRETTSTLKAWLQEHRKNPYPTKGEKIMLAIITKMTLTQVSTWFANARRRLKKENKMTWPPRNKCADEKR

SEQ ID NO: 524 - protein, 80 aa, Homo sapiens
NIEKQIYLPSTRAKTSIVWHFFHVDPQYTWRAICNLCEKSVSRGKPGSHLGTSTLQRHLQARHSPHWTRANKFGVASGEE

SEQ ID NO: 525 - protein, 80 aa, Homo sapiens
AKQNDDSEAGAKRPRTTITAKQLETLKNAYKNSPKPARHVREQLSSETGLDMRVVQVWFQNRRAKEKRLKKDAGRHRWGQ

SEQ ID NO: 526 - protein, 80 aa, Homo sapiens
DALSYLDQVKLQFGSQPQVYNDFLDIMKEFKSQSIDTPGVISRVSQLFKGHPDLIMGFNTFLPPGYKIEVQTNDMVNVTT

SEQ ID NO: 527 - protein, 80 aa, Homo sapiens
DDHTVCLWDINAGPKEGKIVDAKAIFTGHSAVVEDVAWHLLHESLFGSVADDQKLMIWDTRSNTTSKPSHLVDAHTAEVN

SEQ ID NO: 528 - protein, 80 aa, Homo sapiens
GSILLDKDGKRKHTRPTFSGQQIFALEKTFEQTKYLAGPERARLAYSLGMTESQVKVWFQNRRTKWRKKHAAEMATAKKK

SEQ ID NO: 529 - protein, 80 aa, Homo sapiens
DPTALVEAIVEEVACPICMTFLREPMSIDCGHSFCHSCLSGLWEIPGESQNWGYTCPLCRAPVQPRNLRPNWQLANVVEK

SEQ ID NO: 530 - protein, 80 aa, Homo sapiens
QSLPKKVSLSSDTTRKPLEIRSPSAESKKPKWVPPAASGGSRSSSSPLVVVSVKSPNQSLRLGLSRLARVKPLHPNATST

SEQ ID NO: 531 - protein, 80 aa, Homo sapiens
AKSSQRKQRDCVNQCKSKPGLSTSIPLRMSSYTFKRPVTRITPHPGNEVRYHQWEESLEKPQQVCWQRRLQGLQAYSSAG

SEQ ID NO: 532 - protein, 80 aa, Homo sapiens
VRMVNGKPKKVRKPRTIYSSFQLAALQRRFQKTQYLALPERAELAASLGLTQTQVKIWFQNKRSKIKKIMKNGEMPPEHS

SEQ ID NO: 533 - protein, 80 aa, Homo sapiens
LQCNNHACGWDGGDCSLNFNDPWKNCTQSLQCWKYFSDGHCDSQCNSAGCLFDGFDCQRAEGQCNPLYDQYCKDHFSDGH

SEQ ID NO: 534 - protein, 80 aa, Homo sapiens
ETWVEEDELFQVQAAPDEDSTTNITKKQKWTVEESEWVKAGVQKYGEGNWAAISKNYPFVNRTAVMIKDRWRTMKRLGMN

SEQ ID NO: 535 - protein, 80 aa, Homo sapiens
AEISLWTVVAAIQAVERKVDAQASQLLNLEGRTGTAEKKLADCEKTAVEFGNHMESKWAVLGTLLQEYGLLQRRLENLEN

SEQ ID NO: 536 - protein, 80 aa, Homo sapiens
LEKRTLFRLDLVPINRSVGLKAKPTKPVTEVLRPVVARYGLDLSGLLVRLSGEKEPLDLGAPISSLDGQRVVLEEKDPSR

SEQ ID NO: 537 - protein, 80 aa, Homo sapiens
PNCLSSSMQLPHGGGRHQELVRFRDVAVVFSPEEWDHLTPEQRNLYKDVMLDNCKYLASLGNWTYKAHVMSSLKQGKEPW

SEQ ID NO: 538 - protein, 80 aa, Homo sapiens
DDYKEGDLRIMPESSESPPTEREPGGVVDGLIGKHVEYTKEDGSKRIGMVIHQVEAKPSVYFIKFDDDFHIYVYDLVKKS

SEQ ID NO: 539 - protein, 80 aa, Homo sapiens
SEPDLPLKRKQRRSRTTFTAEQLEELEKAFERTHYPDIYTREELAQRTKLTEARVQVWFSNRRARWRKQAGANQLAAFNH

SEQ ID NO: 540 - protein, 80 aa, Homo sapiens
AGGVLDKDGKKKHSRPTFSGQQIFALEKTFEQTKYLAGPERARLAYSLGMTESQVKVWFQNRRTKWRKRHAVEMASAKKK

SEQ ID NO: 541 - protein, 80 aa, Homo sapiens
DVMSFSVTVTTIPASQAMNPSSHGQTIPVQAFSEENSIEGTPSKCYCRLKAMIMCKGCGAFCHDDCIGPSKLCVSCLVVR

SEQ ID NO: 542 - protein, 80 aa, Homo sapiens
GGYSSVSSCNGYGRMGLLHQEKLPSDLDGMFIERLDCDMESIIRNDLMDGDTLDFNFDNVLPNQSFPHSVKTTTHSWVSG

SEQ ID NO: 543 - protein, 80 aa, Homo sapiens
GGSPTGFGCKSRPKARSSTGRECVNCGATSTPLWRRDGTGHYLCNACGLYHKMNGQNRPLIKPKRRLSAARRAGTSCANC

SEQ ID NO: 544 - protein, 80 aa, Homo sapiens
GQNRPLIRPKKRLIVSKRAGTQCTNCQTTTTTLWRRNASGDPVCNACGLYYKLHQVNRPLTMRKDGIQTRNRKASGKGKK

SEQ ID NO: 545 - protein, 80 aa, Homo sapiens
PVALLRKQNFQPTAQQQLTKPAKITCANCKKPLQKGQTAYQRKGSAHLFCSTTCLSSFSHKRTQNTRSIICKKDASTKKA

SEQ ID NO: 546 - protein, 80 aa, Homo sapiens
TEITLWTVVAAIQALEKKVDSCLTRLLTLEGRTGTAEKKLADCEKTAVEFGNQLEGKWAVLGTLLQEYGLLQRRLENVEN

SEQ ID NO: 547 - protein, 80 aa, Homo sapiens
KKQRGRPSSQPRRNIVGCRISHGWKEGDEPITQWKGTVLDQVPINPSLYLVKYDGIDCVYGLELHRDERVLSLKILSDRV

SEQ ID NO: 548 - protein, 80 aa, Homo sapiens
WTCDLDDDCGDRSDESASCAYPTCFPLTQFTCNNGRCININWRCDNDNDCGDNSDEAGCSHSCSSTQFKCNSGRCIPEHW

SEQ ID NO: 549 - protein, 80 aa, Homo sapiens
PKGAAAPSASQRRKRTSFSAEQLQLLELVFRRTRYPDIHLRERLAALTLLPESRIQVWFQNRRAKSRRQSGKSFQPLARP

SEQ ID NO: 550 - protein, 80 aa, Homo sapiens
KIKYDWYQTESQVVITLMIKNVQKNDVNVEFSEKELSALVKLPSGEDYNLKLELLHPIIPEQSTFKVLSTKIEIKLKKPE

SEQ ID NO: 551 - protein, 80 aa, Homo sapiens
DPSKEVEYVCELCKGAAPPDSPVVYSDRAGYNKQWHPTCFVCAKCSEPLVDLIYFWKDGAPWCGRHYCESLRPRCSGCDE

SEQ ID NO: 552 - protein, 80 aa, Homo sapiens
GSGAGKAKKSVDKNSNEYRVRRERNNIAVRKSRDKAKQRNVETQQKVLELTSDNDRLRKRVEQLSRELDTLRGIFRQLPE

SEQ ID NO: 553 - protein, 80 aa, Homo sapiens
GPASSFTPKQRSKARSCSEGRECVNCGATATPLWRRDGTGHYLCNACGLYHKMNGQNRPLIKPKRRLSAARRAGTCCANC

SEQ ID NO: 554 - protein, 80 aa, Homo sapiens
KPSDHIKRPMNAFMVWSRGQRRKMAQENPKMHNSEISKRLGAEWKLLSEAEKRPYIDEAKRLRAQHMKEHPDYKYRPRRK

SEQ ID NO: 555 - protein, 80 aa, Homo sapiens
LYSGFQQTADKCSVCGHLIMEMILQALGKSYHPGCFRCSVCNECLDGVPFTVDVENNIYCVRDYHTVFAPKCASCARPIL

SEQ ID NO: 556 - protein, 80 aa, Homo sapiens
HPSQDLVFSASPDATIRIWSVPNASCVQVVRAHESAVTGLSLHATGDYLLSSSDDQYWAFSDIQTGRVLTKVTDETSGCS

SEQ ID NO: 557 - protein, 80 aa, Homo sapiens
ELSAVGERVFAAESIIKRRIRKGRIEYLVKWKGWAIKYSTWEPEENILDSRLIAAFEQKERERELYGPKKRGPKPKTFLL

SEQ ID NO: 558 - protein, 80 aa, Homo sapiens
RTGSDSKSGKPRRARTAFTYEQLVALENKFKATRYLSVCERLNLALSLSLTETQVKIWFQNRRTKWKKQNPGADTSAPTG

SEQ ID NO: 559 - protein, 80 aa, Homo sapiens
VWDLSKIGEEQSPEDAEDGPPELLFIHGGHTAKISDFSWNPNEPWVICSVSEDNIMQVWQMAENIYNDEDPEGSVDPEGQ

SEQ ID NO: 560 - protein, 80 aa, Homo sapiens
ERCTPAGGGAEPRKLSRTPKCARCRNHGVVSCLKGHKRFCRWRDCQCANCLLVVERQRVMAAQVALRRQQATEDKKGLSG

SEQ ID NO: 561 - protein, 80 aa, Homo sapiens
SQPGALIPGDPQAMSQPNRGPSPFSPVQLHQLRAQILAYKMLARGQPLPETLQLAVQGKRTLPGLQQQQQQQQQQQQQQQ

SEQ ID NO: 562 - protein, 573 aa, Homo sapiens; identical to SEQ ID NO: 89

SEQ ID NO: 563 - protein, 441 aa, Homo sapiens
MSEREVSTAPAGTDMPAAKKQKLSSDENSNPDLSGDENDDAVSIESGTNTERPDTPTNTPNAPGRKSWGKGKWKSKKCKYSFKCVNSLKEDHNQPLFGVQFNWHSKEGDPLVFATVGSNRVTLYECHSQGEIRLLQSYVDADADENFYTCAWTYDSNTSHPLLAVAGSRGIIRIINPITMQCIKHYVGHGNAINELKFHPRDPNLLLSVSKDHALRLWNIQTDTLVAIFGGVEGHRDEVLSADYDLLGEKIMSCGMDHSLKLWRINSKRMMNAIKESYDYNPNKTNRPFISQKIHFPDFSTRDIHRNYVDCVRWLGDLILSKSCENAIVCWKPGKMEDDIDKIKPSESNVTILGRFDYSQCDIWYMRFSMDFWQKMLALGNQVGKLYVWDLEVEDPHKAKCTTLTHHKCGAAIRQTSFSRDSSILIAVCDDASIWRWDRLR

SEQ ID NO: 564 - protein, 485 aa, Homo sapiens
MPAMVEKGPEVSGKRRGRNNAAASASAAAASAAASAACASPAATAASGAAASSASAAAASAAAAPNNGQNKSLAAAAPNGNSSSNSWEEGSSGSSSDEEHGGGGMRVGPQYQAVVPDFDPAKLARRSQERDNLGMLVWSPNQNLSEAKLDEYIAIAKEKHGYNMEQALGMLFWHKHNIEKSLADLPNFTPFPDEWTVEDKVLFEQAFSFHGKTFHRIQQMLPDKSIASLVKFYYSWKKTRTKTSVMDRHARKQKREREESEDELEEANGNNPIDIEVDQNKESKKEVPPTETVPQVKKEKHSTQAKNRAKRKPPKGMFLSQEDVEAVSANATAATTVLRQLDMELVSVKRQIQNIKQTNSALKEKLDGGIEPYRLPEVIQKCNARWTTEEQLLAVQAIRKYGRDFQAISDVIGNKSVVQVKNFFVNYRRRFNIDEVLQEWEAEHGKEETNGPSNQKPVKSPDNSIKMPEEEDEAPVLDVRYASAS

SEQ ID NO: 565 - protein, 77 aa, Synthetic construct
TGRTLVTFKDVFVDFTREEWKLLDTAQQIVYRNVMLENYKNLVSLGYQLTKPDVILRLEKGEEPLEINLWITKFVKD

SEQ ID NO: 566 - protein, 120 aa, Synthetic construct
MYPYDVPDYASPKKKRKVGGGASMDAKSLTAWSRTLVTFKDVFVDFTREEWKLLDTAQQIVYRNVMLENYKNLVSLGYQLTKPDVILRLEKGEEPWLVEREIHQETHPDSETAFEIKSSV

SEQ ID NO: 567 - protein, 117 aa, Synthetic construct
ALSPQHSAVTQGSIIKNKEGMDAKSLTAWSRTLVTFKDVFVDFTREEWKLLDTAQQIVYRNVMLENYKNLVSLGYQLTKPDVILRLEKGEEPWLVEREIHQETHPDSETAFEIKSSV

SEQ ID NO: 568 - protein, 62 aa, Synthetic construct
RTLVTFKDVFVDFTREEWKLLDTAQQIVYRNVMLENYKNLVSLGYQLTKPDVILRLEKGEEP

SEQ ID NO: 569 - protein, 98 aa, Synthetic construct
RTLVTFKDVFVDFTREEWKLLDTAQQIVYRNVMLENYKNLVSLGYQLTKPDVILRLEKGEEPWLVEREIHQETHPDSETAFEIKSSVSSRSIFKDKQS

SEQ ID NO: 570 - protein, 99 aa, Synthetic construct
RTLVTFKDVAVDFTQEEWQQLDPAQKIVYRDVMLENYSNLVSVGYQLTKPDVILRLEQKGEEPWLVEEEIHQETHPDSETAFEIKSSVSSRSIFKDKQS

SEQ ID NO: 571 - protein, 95 aa, Synthetic construct
RTLVTFKDVFVDFTREEWKLLDTAQQIVYRNVMLENYKNLVSLGYQLTKPDVILRLEKGEEPWLEEEEVLGSGRAEKNGDIGGQIWKPKDVKESL

SEQ ID NO: 572 - protein, 103 aa, Synthetic construct
MNNSQGRVTFEDVTVNFTQGEWQRLNPEQRNLYRDVMLENYSNLVSVGQGETTKPDVILRLEQGKEPWLVEREIHQETHPDSETAFEIKSSVSSRSIFKDKQS

SEQ ID NO: 573 - protein, 1615 aa, Homo sapiens
MPARTAPARVPTLAVPAISLPDDVRRRLKDLERDSLTEKECVKEKLNLLHEFLQTEIKNQLCDLETKLRKEELSEEGYLAKVKSLLNKDLSLENGAHAYNREVNGRLENGNQARSEARRVGMADANSPPKPLSKPRTPRRSKSDGEAKPEPSPSPRITRKSTRQTTITSHFAKGPAKRKPQEESERAKSDESIKEEDKDQDEKRRRVTSRERVARPLPAEEPERAKSGTRTEKEEERDEKEEKRLRSQTKEPTPKQKLKEEPDREARAGVQADEDEDGDEKDEKKHRSQPKDLAAKRRPEEKEPEKVNPQISDEKDEDEKEEKRRKTTPKEPTEKKMARAKTVMNSKTHPPKCIQCGQYLDDPLKYGQHPPDAVDEPQMLTNEKLSIFDANESGFESYEALPQHKLTCFSVYCKHGHLCPIDTGLIEKNIELFFSGSAKPIYDDDPSLEGGVNGKNLGPINEWWITGFDGGEKALIGFSTSFAEYILMDPSPEYAPIFGLMQEKIYISKIVVEFLQSNSDSTYEDLINKIETTVPPSGLNLNRFTEDSLLRHAQFVVEQVESYDEAGDSDEQPIFLTPCMRDLIKLAGVTLGQRRAQARRQTIRHSTREKDRGPTKATTTKLVYQIFDTFFAEQIEKDDREDKENAFKRRRCGVCEVCQQPECGKCKACKDMVKFGGSGRSKQACQERRCPNMAMKEADDDEEVDDNIPEMPSPKKMHQGKKKKQNKNRISWVGEAVKTDGKKSYYKKVCIDAETLEVGDCVSVIPDDSSKPLYLARVTALWEDSSNGQMFHAHWFCAGTDTVLGATSDPLELFLVDECEDMQLSYIHSKVKVIYKAPSENWAMEGGMDPESLLEGDDGKTYFYQLWYDQDYARFESPPKTQPTEDNKFKFCVSCARLAEMRQKEIPRVLEQLEDLDSRVLYYSATKNGILYRVGDGVYLPPEAFTFNIKLSSPVKRPRKEPVDEDLYPEHYRKYSDYIKGSNLDAPEPYRIGRIKEIFCPKKSNGRPNETDIKIRVNKFYRPENTHKSTPASYHADINLLYWSDEEAVVDFKAVQGRCTVEYGEDLPECVQVYSMGGPNRFYFLEAYNAKSKSFEDPPNHARSPGNKGKGKGKGKGKPKSQACEPSEPEIEIKLPKLRTLDVFSGCGGLSEGFHQAGISDTLWAIEMWDPAAQAFRLNNPGSTVFTEDCNILLKLVMAGETTNSRGQRLPQKGDVEMLCGGPPCQGFSGMNRFNSRTYSKFKNSLVVSFLSYCDYYRPRFFLLENVRNFVSFKRSMVLKLTLRCLVRMGYQCTFGVLQAGQYGVAQTRRRAIILAAAPGEKLPLFPEPLHVFAPRACQLSVVVDDKKFVSNITRLSSGPFRTITVRDTMSDLPEVRNGASALEISYNGEPQSWFQRQLRGAQYQPILRDHICKDMSALVAARMRHIPLAPGSDWRDLPNIEVRLSDGTMARKLRYTHHDRKNGRSSSGALRGVCSCVEAGKACDPAARQFNTLIPWCLPHTGNRHNHWAGLYGRLEWDGFFSTTVTNPEPMGKQGRVLHPEQHRVVSVRECARSQGFPDTYRLFGNILDKHRQVGNAVPPPLAKAIGLEIKLCMLAKARESASAKIKEEEAAKD

SEQ ID NO: 574 - protein, 912 aa, Homo sapiens
MPAMPSSGPGDTSSSAAEREEDRKDGEEQEEPRGKEERQEPSTTARKVGRPGRKRKHPPVESGDTPKDPAVISKSPSMAQDSGASELLPNGDLEKRSEPQPEEGSPAGGQKGGAPAEGEGAAETLPEASRAVENGCCTPKEGRGAPAEAGKEQKETNIESMKMEGSRGRLRGGLGWESSLRQRPMPRLTFQAGDPYYISKRKRDEWLARWKREAEKKAKVIAGMNAVEENQGPGESQKVEEASPPAVQQPTDPASPTVATTPEPVGSDAGDKNATKAGDDEPEYEDGRGFGIGELVWGKLRGFSWWPGRIVSWWMTGRSRAAEGTRWVMWFGDGKFSVVCVEKLMPLSSFCSAFHQATYNKQPMYRKAIYEVLQVASSRAGKLFPVCHDSDESDTAKAVEVQNKPMIEWALGGFQPSGPKGLEPPEEEKNPYKEVYTDMWVEPEAAAYAPPPPAKKPRKSTAEKPKVKEIIDERTRERLVYEVRQKCRNIEDICISCGSLNVTLEHPLFVGGMCQNCKNCFLECAYQYDDDGYQSYCTICCGGREVLMCGNNNCCRCFCVECVDLLVGPGAAQAAIKEDPWNCYMCGHKGTYGLLRRREDWPSRLQMFFANNHDQEFDPPKVYPPVPAEKRKPIRVLSLFDGIATGLLVLKDLGIQVDRYIASEVCEDSITVGMVRHQGKIMYVGDVRSVTQKHIQEWGPFDLVIGGSPCNDLSIVNPARKGLYEGTGRLFFEFYRLLHDARPKEGDDRPFFWLFENVVAMGVSDKRDISRFLESNPVMIDAKEVSAAHRARYFWGNLPGMNRPLASTVNDKLELQECLEHGRIAKFSKVRTITTRSNSIKQGKDQHFPVFMNEKEDILWCTEMERVFGFPVHYTDVSNMSRLARQRLLGRSWSVPVIRHLFAPLKEYFACV

SEQ ID NO: 575 - protein, 301 aa, Homo sapiens
NHDQEFDPPKVYPPVPAEKRKPIRVLSLFDGIATGLLVLKDLGIQVDRYIASEVCEDSITVGMVRHQGKIMYVGDVRSVTQKHIQEWGPFDLVIGGSPCNDLSIVNPARKGLYEGTGRLFFEFYRLLHDARPKEGDDRPFFWLFENVVAMGVSDKRDISRFLESNPVMIDAKEVSAAHRARYFWGNLPGMNRPLASTVNDKLELQECLEHGRIAKFSKVRTITTRSNSIKQGKDQHFPVFMNEKEDILWCTEMERVFGFPVHYTDVSNMSRLARQRLLGRSWSVPVIRHLFAPLKEYFACV

SEQ ID NO: 576 - protein, 853 aa, Homo sapiens
MKGDTRHLNGEEDAGGREDSILVNGACSDQSSDSPPILEAIRTPEIRGRRSSSRLSKREVSSLLSYTQDLTGDGDGEDGDGSDTPVMPKLFRETRTRSESPAVRTRNNNSVSSRERHRPSPRSTRGRQGRNHVDESPVEFPATRSLRRRATASAGTPWPSPPSSYLTIDLTDDTEDTHGTPQSSSTPYARLAQDSQQGGMESPQVEADSGDGDSSEYQDGKEFGIGDLVWGKIKGFSWWPAMVVSWKATSKRQAMSGMRWVQWFGDGKFSEVSADKLVALGLFSQHFNLATFNKLVSYRKAMYHALEKARVRAGKTFPSSPGDSLEDQLKPMLEWAHGGFKPTGIEGLKPNNTQPVVNKSKVRRAGSRKLESRKYENKTRRRTADDSATSDYCPAPKRLKTNCYNNGKDRGDEDQSREQMASDVANNKSSLEDGCLSCGRKNPVSFHPLFEGGLCQTCRDRFLELFYMYDDDGYQSYCTVCCEGRELLLCSNTSCCRCFCVECLEVLVGTGTAAEAKLQEPWSCYMCLPQRCHGVLRRRKDWNVRLQAFFTSDTGLEYEAPKLYPAIPAARRRPIRVLSLFDGIATGYLVLKELGIKVGKYVASEVCEESIAVGTVKHEGNIKYVNDVRNITKKNIEEWGPFDLVIGGSPCNDLSNVNPARKGLYEGTGRLFFEFYHLLNYSRPKEGDDRPFFWMFENVVAMKVGDKRDISRFLECNPVMIDAIKVSAAHRARYFWGNLPGMNRPVIASKNDKLELQDCLEYNRIAKLKKVQTITTKSNSIKQGKNQLFPVVMNGKEDVLWCTELERIFGFPVHYTDVSNMGRGARQKLLGRSWSVPVIRHLFAPLKDYFACE

SEQ ID NO: 577 - protein, 740 aa, Mus musculus
MRGGSRHLSNEEDVSGCEDCIIISGTCSDQSSDPKTVPLTQVLEAVCTVENRGCRTSSQPSKRKASSLISYVQDLTGDGDEDRDGEVGGSSGSGTPVMPQLFCETRIPSKTPAPLSWQANTSASTPWLSPASPYPIIDLTDEDVIPQSISTPSVDWSQDSHQEGMDTTQVDAESRDGGNIEYQVSADKLLLSQSCILAAFYKLVPYRESIYRTLEKARVRAGKACPSSPGESLEDQLKPMLEWAHGGFKPTGIEGLKPNKKQPENKSRRRTTNDPAASESSPPKRLKTNSYGGKDRGEDEESREQMASDVTNNKGNLEDHCLSCGRKDPVSFHPLFEGGLCQSCRDRFLELFYMYDEDGYQSYCTVCCEGRELLLCSNTSCCRCFCVECLEVLVGAGTAEDVKLQEPWSCYMCLPQRCHGVLRRRKDWNMRLQDFFTTDPDLEEFEPPKLYPAIPAAKRRPIRVLSLFDGIATGYLVLKELGIKVEKYIASEVCAESIAVGTVKHEGQIKYVDDIRNITKEHIDEWGPFDLVIGGSPCNDLSCVNPVRKGLFEGTGRLFFEFYRLLNYSCPEEEDDRPFFWMFENVVAMEVGDKRDISRFLECNPVMIDAIKVSAAHRARYFWGNLPGMNRPVMASKNDKLELQDCLEFSRTAKLKKVQTITTKSNSIRQGKNQLFPVVMNGKDDVLWCTELERIFGFPEHYTDVSNMGRGARQKLLGRSWSVPVIRHLFAPLKDHFACE

SEQ ID NO: 578 - protein, 387 aa, Homo sapiens
MAAIPALDPEAEPSMDVILVGSSELSSSVSPGTGRDLIAYEVKANQRNIEDICICCGSLQVHTQHPLFEGGICAPCKDKFLDALFLYDDDGYQSYCSICCSGETLLICGNPDCTRCYCFECVDSLVGPGTSGKVHAMSNWVCYLCLPSSRSGLLQRRRKWRSQLKAFYDRESENPLEMFETVPVWRRQPVRVLSLFEDIKKELTSLGFLESGSDPGQLKHVVDVTDTVRKDVEEWGPFDLVYGATPPLGHTCDRPPSWYLFQFHRLLQYARPKPGSPRPFFWMFVDNLVLNKEDLDVASRFLEMEPVTIPDVHGGSLQNAVRVWSNIPAIRSSRHWALVSEEELSLLAQNKQSSKLAAKWPTKLVKNCFLPLREYFKYFSTELTSSL

SEQ ID NO: 579 - protein, 213 aa, Homo sapiens
NPLEMFETVPVWRRQPVRVLSLFEDIKKELTSLGFLESGSDPGQLKHVVDVTDTVRKDVEEWGPFDLVYGATPPLGHTCDRPPSWYLFQFHRLLQYARPKPGSPRPFFWMFVDNLVLNKEDLDVASRFLEMEPVTIPDVHGGSLQNAVRVWSNIPAIRSRHWALVSEEELSLLAQNKQSSKLAAKWPTKLVKNCFLPLREYFKYFSTELTSSL

SEQ ID NO: 580 - protein, 421 aa, Mus musculus
MGSRETPSSCSKTLETLDLETSDSSSPDADSPLEEQWLKSSPALKEDSVDVVLEDCKEPLSPSSPPTGREMIRYEVKVNRRSIEDICLCCGTLQVYTRHPLFEGGLCAPCKDKFLESLFLYDDDGHQSYCTICCSGGTLFICESPDCTRCYCFECVDILVGPGTSERINAMACWVCFLCLPFSRSGLLQRRKRWRHQLKAFHDQEGAGPMEIYKTVSAWKRQPVRVLSLFRNIDKVLKSLGFLESGSGSGGGTLKYVEDVTNVVRRDVEKWGPFDLVYGSTQPLGSSCDRCPGWYMFQFHRILQYALPRQESQRPFFWIFMDNLLLTEDDQETTTRFLQTEAVTLQDVRGRDYQNAMRVWSNIPGLKSKHAPLTPKEEEYLQAQVRSRSKLDAPKVDLLVKNCLLPLREYFKYFSQNSLPL

SEQ ID NO: 581 - protein, 214 aa, Mus musculus
GPMEIYKTVSAWKRQPVRVLSLFRNIDKVLKSLGFLESGSGSGGGTLKYVEDVTNVVRRDVEKWGPFDLVYGSTQPLGSSCDRCPGWYMFQFHRILQYALPRQESQRPFFWIFMDNLLLTEDDQETTTRFLQTEAVTLQDVRGRDYQNAMRVWSNIPGLKSKHAPLTPKEEEYLQAQVRSRSKLDAPKVDLLVKNCLLPLREYFKYFSQNSLPL

SEQ ID NO: 582 - protein, 403 aa, Ailuropoda melanoleuca
MALSPTGTLSVETLDRSDPDPLDEGPWQATCEILLEPDAEHSTDVILVGSSELSAPASPGPRRDLLAYEVKVNQRDIEDVCICCGSLRVHTQHPLFEGGMCAPCKDKFLDCLFLYDDDGYQSYCSICCAGETLLICENPDCTRPSLMMKLRLFRECACLIFPSEGMLLQTVWFWKMTVVWQPGLRHLPQENPLETYKTVPVWKREPVRVLSLFGDIRRELMSLGFLESGSAPGRLKHLDDVTDVVRKDVEGWGPFDLVYGSTPPIGHACDHPPVWYLLQFHRILQYARPRPGSQQPFFWMFVDNLVLSQDDQTAATRFLEADPVTIQDVCGRAVRNTVHVWSNIPAVRSRHSALALCEELSLLAQDRQRTKPPAQGPAQLVKNCFLPLREYFKYFSTELTSSL

SEQ ID NO: 583 - protein, 213 aa, Ailuropoda melanoleuca
NPLETYKTVPVWKREPVRVLSLFGDIRRELMSLGFLESGSAPGRLKHLDDVTDVVRKDVEGWGPFDLVYGSTPPIGHACDHPPVWYLLQFHRILQYARPRPGSQQPFFWMFVDNLVLSQDDQTAATRFLEADPVTIQDVCGRAVRNTVHVWSNIPAVRSRHSALALCEELSLLAQDRQRTKPPAQGPAQLVKNCFLPLREYFKYFSTELTSSL

SEQ ID NO: 584 - protein, 426 aa, Carlito syrichta
MALSCRRTLPLESLHSSNSDLASQLDKEQWRPPCETHGIPVAAAPVLDLEAECSLDVILVGSSELSTSSSPRLGRDHIAYEVKVNQRNIEDICLCCGSFLVHTQHPLFEGGMCAPCKDKFLDTLFLYDEDGYQSYCSICCSGETLLICENPDCTRCYCFECLDTLVSPGTSEKVHAMSNWVCFLCLPFTRSGLLQRRRKWRGQLKAFYDRESESSLEMYKTVPVWKREPVRVLSLFGDIKKELMSLGFVETGSDPGRLRHLDDTTNIVRRNVEEWGPFHLLYGATPPLGHTCDRPPGWYLFQFHRLLQYARPQPGSPQPFFWMFVDNVMLTREDRAIASRFLETEPVTIPDIHGRALQNAVCVWSNIPAVRSKHSALVSEEELSLLAQDRQRAKLPTQGPTKLVKNCFLPLREYFKYFSTELTSFL

SEQ ID NO: 585 - protein, 213 aa, Carlito syrichta
SSLEMYKTVPVWKREPVRVLSLFGDIKKELMSLGFVETGSDPGRLRHLDDTTNIVRRNVEEWGPFHLLYGATPPLGHTCDRPPGWYLFQFHRLLQYARPQPGSPQPFFWMFVDNVMLTREDRAIASRFLETEPVTIPDIHGRALQNAVCVWSNIPAVRSKHSALVSEEELSLLAQDRQRAKLPTQGPTKLVKNCFLPLREYFKYFSTELTSFL

SEQ ID NO: 586 - protein, 424 aa, Meriones unguiculatus
MGSQETPSTRAKTPGTWNLESTDSSSPESLGHLEEQWANSSPDLKDEHSKDVEPEDSKELISSASPPSGREIIRYEISVNQRNIEDICLCCGTLQVYKQHPLFEGGICAPCKDKFLETFFLYDEDGHQSYCSICCSGGTLFICESPDCTRCYCFECVDILVGPGTSERINAMPCWVCFLCLPFTRSGLLQRRRKWRHQLKAFFDEGGASPLEMYKTVSAWKRKPMRVLSLFKNIDKELKNLGFLESGSGSEEERLKYLEDVTNVVRRDVEKWGPFDLVYGSTRPRGSSCDHCPAWYMFQFHRILQYARPPSGSEQPFFWVFVDNLLMTEDDQITADRFLQMKAVTLQDVRGRVLQNAVRVWSNIPGVKSKHMALTEKEEQSLEAQAGTRTKLSAQKVDPLVKNCLLPLREYFKFFSQNSLPLDK

SEQ ID NO: 587 - protein, 216 aa, Meriones unguiculatus
SPLEMYKTVSAWKRKPMRVLSLFKNIDKELKNLGFLESGSGSEEERLKYLEDVTNVVRRDVEKWGPFDLVYGSTRPRGSSCDHCPAWYMFQFHRILQYARPPSGSEQPFFWVFVDNLLMTEDDQITADRFLQMKAVTLQDVRGRVLQNAVRVWSNIPGVKSKHMALTEKEEQSLEAQAGTRTKLSAQKVDPLVKNCLLPLREYFKFFSQNSLPLDK

SEQ ID NO: 588 - protein, 409 aa, Ochotona princeps
MALPSPETLDSLDRVPASHPDEQHWTVCDNSDPILEVEAEGSMDVILVDDSPAPSGRDRIELEVKVNQRSIEDLCLCCGSSQVHRQHPLFQGGLCAPCKDKFLEALFLYDEDGYQSYCSICGLGDTLLVCESPDCTRGYCFACVDGLVGAGSSGHMHTVSPWVCFLCVPGSRHGLLQRRRRWRTQLKVFHEQEAAQPLEIYETVPACRRKPLRVLSLFEHIEKELASLGFLETGSSPGRIRHLDDVTDVVRRDVEQWGPFDLVYGSTPPLGHASPRSPGWYLFQFHRMLQYTQPTASTQRPFFWMFVDNLLLTRDDLVTATRFLEVEPATLQDVRGRVLQGAMRVWSNIPAVNSRHTELAPEAETALLAQSCRRAKASGEGLARLLKSCFLPLREYFKYFPQSPLPLRK

SEQ ID NO: 589 - protein, 214 aa, Ochotona princeps
QPLEIYETVPACRRKPLRVLSLFEHIEKELASLGFLETGSSPGRIRHLDDVTDVVRRDVEQWGPFDLVYGSTPPLGHASPRSPGWYLFQFHRMLQYTQPTASTQRPFFWMFVDNLLLTRDDLVTATRFLEVEPATLQDVRGRVLQGAMRVWSNIPAVNSRHTELAPEAETALLAQSCRRAKASGEGLARLLKSCFLPLREYFKYFPQSPLPLRK

SEQ ID NO: 590 - protein, 224 aa, unidentified
  source 1..224: note = Neosciurus carolinensis
MGGPRPAAVEESPHEIYKTVPAWKREPMRVLSLFGDIGKELTSLGFLETGSEAGRLKHLEDVTDTVRRDVEEWGPFDLVYGSTPALGHSCDRSPGWYLFQFHRLLQYARPRLGSPKPFFWMFVDNLLLTKDDQAIASRFLEMEPVTLQDVHGRVLQNAVRVWTNVPAVKSRHSALASEEELLLVQDGQRGRLPAQGPAALVKHCFLPLREYFKYFSQNTLPLYK

SEQ ID NO: 591 - protein, 213 aa, unidentified
  source 1..213: note = Neosciurus carolinensis
SPHEIYKTVPAWKREPMRVLSLFGDIGKELTSLGFLETGSEAGRLKHLEDVTDTVRRDVEEWGPFDLVYGSTPALGHSCDRSPGWYLFQFHRLLQYARPRLGSPKPFFWMFVDNLLLTKDDQAIASRFLEMEPVTLQDVHGRVLQNAVRVWTNVPAVKSRHSALASEEELLLVQDGQRGRLPAQGPAALVKHCFLPLREYFKYFSQNTLPLYK

SEQ ID NO: 592 - protein, 417 aa, Bison bison
MARSSPGTLNLEIMDGSDPDPALPPDREQWPPPCEILLDPEPEHSLDIILVGSSELSSPPSPGPRRDFIAYEVKVNQRDIEDVCICCGSLQLHTQHPLFEGGMCAPCKDKFLECLFLYDDDGYQSYCSICCAGETLLICENPDCTRCYCFECVDTLVGPGTSGKVHAMSNWVCFLCLPFPRSGLLQRRRKWRTWLKAFYDREAESPLVMYKTVPVWKREPIRVLSLFGDIKKELTSLGFLEDGSKPGRLKHLDDVTNIVRRDIDEWGPFDLTYGSTPTLGHTCDHPPGWYVYQFHRILQYARPLPGSPQPFFWMFVDNLVLTEEDLDVATRFLETDPVTIQDVRGRTVQNAVHVWSNIPAVKSRHSALVSQEELSLLAQDRQRVKSPVQGPATLVKNCFLPLREYFKYFSTELTSSL

SEQ ID NO: 593 - protein, 213 aa, Bison bison
SPLVMYKTVPVWKREPIRVLSLFGDIKKELTSLGFLEDGSKPGRLKHLDDVTNIVRRDIDEWGPFDLTYGSTPTLGHTCDHPPGWYVYQFHRILQYARPLPGSPQPFFWMFVDNLVLTEEDLDVATRFLETDPVTIQDVRGRTVQNAVHVWSNIPAVKSRHSALVSQEELSLLAQDRQRVKSPVQGPATLVKNCFLPLREYFKYFSTELTSSL

SEQ ID NO: 594 - protein, 443 aa, Equus przewalskii
MALSSPGTLSLETLDSWDPDVAGQLDEERWQPSSEIVGRPMAAAPVLDLEEEPSMDIILVDSSELSSPPSPGPSRDMCICCGSFQVHTQHPLFEGGMCAACKDKFLSCLFLYDDDGNQSYCSICCSGETLLICENPDCTRCYCFECVDTLVSPRTSEKVQAMSNWVCFLCLPFPRSGLLQRRRKWRGWLKAFYDQEAVRSRSAWGRRMRSGPHLVGFLWLLVAKCPSALESPLEMYKTVPVWKREPVRVLSLFGDIKKELTTLGFLENGSDPGRLKHLDDVTNTVRRDVEEWGPFDLVYGSTPPLGHACDHPPGWYLFQFHRVLQYARPRPGSPQAFFWMFVDNLVLTEDDRAVATRFLETDPVTIQDVCGRAVRNAVHVWSNIPAVKSRHSALFSQEESFLRAQDRQRAKPPARGPAKLVKNCFLPLREYFKYFSTEFTSSL

SEQ ID NO: 595 - protein, 213 aa, Equus przewalskii
SPLEMYKTVPVWKREPVRVLSLFGDIKKELTTLGFLENGSDPGRLKHLDDVTNTVRRDVEEWGPFDLVYGSTPPLGHACDHPPGWYLFQFHRVLQYARPRPGSPQAFFWMFVDNLVLTEDDRAVATRFLETDPVTIQDVCGRAVRNAVHVWSNIPAVKSRHSALFSQEESFLRAQDRQRAKPPARGPAKLVKNCFLPLREYFKYFSTEFTSSL

SEQ ID NO: 596 - protein, 415 aa, Mus caroli
MGSRETPSSFSKTLETLDLETSDSSSPDADSPLEEQWLKSSPALKEDNVDMVLEDCKEPLSPSSPPTGREMIRYEVKVNRRSIEDICLCCGTLQVYTQHPLFEGGICAPCKDKFLESLFLYDDDGHQSYCTICCSGGTLFICESPDCTRCYCFECVDILVGPGTSERINAMACWVCFLCLPFSRSGLLQRRKRWRHQLKAFHDQEGAGPMEIYKTVSTWKRQPVRVLSLFGNIDKVLKSLGFLESGSGSGGGTLKYVEDVTNVVRRDVEKWGPFDLVYGSTQPLGSSCDRCPGWYMFQFHRILQYALPRQESQRPFFWIFMDNLLMTEDDQETTARFLQTEAVTLQDVRGRDYQNVMRVWSNIPGLKSKHVPLTPKEEEYLQAQVRTRSKLDAQKVDLLVKNCLLPLREYFKYFS

SEQ ID NO: 597 - protein, 208 aa, Mus caroli
GPMEIYKTVSTWKRQPVRVLSLFGNIDKVLKSLGFLESGSGSGGGTLKYVEDVTNVVRRDVEKWGPFDLVYGSTQPLGSSCDRCPGWYMFQFHRILQYALPRQESQRPFFWIFMDNLLMTEDDQETTARFLQTEAVTLQDVRGRDYQNVMRVWSNIPGLKSKHVPLTPKEEEYLQAQVRTRSKLDAQKVDLLVKNCLLPLREYFKYFS

SEQ ID NO: 598 - protein, 387 aa, Pan troglodytes
MAAIPALDPEAEPSMDVILVGSSELSSSISPRTGRDLIAYEVKANQRNIEDICICCGSLQVHTQHPLFEGGICAPCKDKSLDALFLYDDDGYQSYCSICCSGETLLICGNPDCTRCYCFECVDSLVGPGTSGKVHAMSNWVCYLCLPSSRSGLLQRRRKWRSQLKAFYDRESENPLEMFETVPVWRRQPVRVLSLFEDIKKELTSLGFLESGSDPGQLKHVVDVTDTVRKDVEEWGPFDLVYGATPPLGHTCDRPPSWYLFQFHRLLQYARPKPGSPRPFFWMFVDNLVLNKEDLDVASRFLEMEPVTIPDVHGGSLQNAVRVWSNIPAIRSSRHWALVSEEELSLLAQNKQSSKLAAKWPTKLVKNCFLPLREYFKYFSTELTSSL

SEQ ID NO: 599 - protein, 214 aa, Pan troglodytes
NPLEMFETVPVWRRQPVRVLSLFEDIKKELTSLGFLESGSDPGQLKHVVDVTDTVRKDVEEWGPFDLVYGATPPLGHTCDRPPSWYLFQFHRLLQYARPKPGSPRPFFWMFVDNLVLNKEDLDVASRFLEMEPVTIPDVHGGSLQNAVRVWSNIPAIRSSRHWALVSEEELSLLAQNKQSSKLAAKWPTKLVKNCFLPLREYFKYFSTELTSSL

SEQ ID NO: 600 - protein, 391 aa, Homo sapiens
MEPLRVLELYSGVGGMHHALRESCIPAQVVAAIDVNTVANEVYKYNFPHTQLLAKTIEGITLEEFDRLSFDMILMSPPCQPFTRIGRQGDMTDSRTNSFLHILDILPRLQKLPKYILLENVKGFEVSSTRDLLIQTIENCGFQYQEFLLSPTSLGIPNSRLRYFLIAKLQSEPLPFQAPGQVLMEFPKIESVHPQKYAMDVENKIQEKNVEPNISFDGSIQCSGKDAILFKLETAEEIHRKNQQDSDLSVKMLKDFLEDDTDVNQYLLPPKSLLRYALLLDIVQPTCRRSVCFTKGYGSYIEGTGSVLQTAEDVQVENIYKSLTNLSQEEQITKLLILKLRYFTPKEIANLLGFPPEFGFPEKITVKQRYRLLGNSLNVHVVAKLIKILYE

SEQ ID NO: 601 - protein, 353 aa, unidentified
  source 1..353: note = Mycoplasmatales bacterium
MAEWYIPAIVSYQAIHNGFTLNKINHKIELQTMIDYLESKTLSMNSKEPVKRGFWYKKHLDEIRIVYTAVKMSEQEGNIFDVRTLFERGLSDIDLLTYSFPCQDLSQQGKQKGMGRDSQTRSGLLWEIEKALDTSKKEDLPKYLLMENVVALTHKVNAEELDEWMMKLESLGYKNDLRILNAGDFGSSQARRRTFMISTLNEKVELPVGNKKPKSMNKILNDEPTRKDFLPALDKFDLTEYKWTKSNINKAKLINYSTFNSEAYVYDSNFTGPTLTASGANSRIKFEYNGKIRKIGAEEAYAYMGFKKSDYIKVNKLNYLNETKMIYTCGNSISVEVLRSIMTNINNNFKENK

SEQ ID NO: 602 - protein, 398 aa, unidentified
  source 1..398: note = Mycoplasma marinum
MLFLIGTFKYVLIYITKVIRIFEAFAGIGAQRKALRNIKSNYEVSGMAEWYIPAIVSYQAIHNGFTLSRVDKKTKLTEMIKYLESKTLSMDSKEPVRTGYWFKKHKDMVRIVYSAVKLSEAEGNIFDVRTLHERKLEDIDLLTYSFPCQDLSQQGKQRGMKKDSGTRSGLLWEIEKALEATPKDKLPKYLLMENVVALTHKTNKKDLDNWKRKLRSLGYYNDINVLNAGDFGSSQARRRAFMISTLDSKVTLPLGDKKPQAISKILNKETRSQDFMPALDEYEKTDFKRTLSNIKKCKLIDYTSFNSEAYVYDPKYTGPTLTASGANSRIKFTHQGKMRKINAEEAYRYMGFSTNDYKKVNNLNFLSETKMIYTCGNSISVEVLEEIMLKIIREDNNG

SEQ ID NO: 603 - protein, 381 aa, Spiroplasma chinense
MKKIRLFEAFAGIGSQRRALKSVVGNNFEIAGLAEWYVPAIVMYQIINNDFSKKNVLDNVPRDEVIDYLNSKCLSWDSKKPVSKNFWNRKSQDILNVIYSAVKKSEEEGNIFDVRTLHERTLESIDILTYSFPCQDLSQQGIQKGMKKNSGTRSGLLWEIEKAIDNTPKNNLPKILLMENVPALLNKTNELELKEWLIKLENMGYKNSIGILNAADFGSPQARRRVFMISSRNKKIELPVGKSKPGKLNDILEKNVEDKFIMTNLEKYDFSEFSLTKSNIKKCSLINYTKFNSEAYVYDPDFTGPTLTASGANSRIKIYDKGFIRRMSPLESFRYMGFDDEDYKKIDEFEFLTDTQKIFVCGNSISIEVLKAIFERIDSNE

SEQ ID NO: 604 - protein, 395 aa, Mycoplasma penetrans
MNSNKDKIKVIKVFEAFAGIGSQFKALKNIARSKNWEIQHSGMVEWFVDAIVSYVAIHSKNFNPKIEQLDKDILSISNDSKMPISEYGIKKINNTIKASYLNYAKKHFNNLFDIKKVNKDNFPKNIDIFTYSFPCQDLSVQGLQKGIDKELNTRSGLLWEIERILEEIKNSFSKEEMPKYLLMENVKNLLSHKNKKNYNTWLKQLEKFGYKSKTYLLNSKNFDNCQNRERVFCLSIRDDYLEKTGFKFKELEKVKNPPKKIKDILVDSSNYKYLNLNKYETTTFRETKSNIISRSLKNYTTFNSENYVYNINGIGPTLTASGANSRIKIETQQGVRYLTPLECFKYMQFDVNDFKKVQSTNLISENKMIYIAGNSIPVKILEAIFNTLEFVNNEE

SEQ ID NO: 605 - protein, 386 aa, Spiroplasma monobiae
MSKVENKTKKLRVFEAFAGIGAQRKALEKVRKDEYEIVGLAEWYVPAIVMYQAIHNNFHTKLEYKSVSREEMIDYLENKTLSWNSKNPVSNGYWKRKKDDELKIIYNAIKLSEKEGNIFDIRDLYKRTLKNIDLLTYSFPCQDLSQQGIQKGMKRGSGTRSGLLWEIERALDSTEKNDLPKYLLMENVGALLHKKNEEELNQWKQKLESLGYQNSIEVLNAADFGSSQARRRVFMISTLNEFVELPKGDKKPKSIKKVLNKIVSEKDILNNLLKYNLTEFKKTKSNINKASLIGYSKFNSEGYVYDPEFTGPTLTASGANSRIKIKDGSNIRKMNSDETFLYIGFDSQDGKRVNEIEFLTENQKIFVCGNSISVEVLEAIIDKIGG

SEQ ID NO: 606 - protein, 358 aa, Haemophilus parainfluenzae
MKDVLDDNLLEEPAAQYSLFEPESNPNLREKFTFIDLFAGIGGFRIAMQNLGGKCIFSSEWDEQAQKTYEANFGDLPYGDITLEETKAFIPEKFDILCAGFPCQAFSIAGKRGGFEDTRGTLFFDVAEIIRRHQPKAFFLENVKGLKNHDKGRTLKTILNVLREDLGYFVPEPAIVNAKNFGVPQNRERIYIVGFHKSTGVNSFSYPEPLDKIVTFADIREEKTVPTKYYLSTQYIDTLRKHKERHESKGNGFGYEIIPDDGIANAIVVGGMGRERNLVIDHRITDFTPTTNIKGEVNREGIRKMTPREWARLQGFPDSYVIPVSDASAYKQFGNSVAVPAIQATGKKILEKLGNLYD

SEQ ID NO: 607 - protein, 521 aa, unidentified
  source 1..521: note = Arthrobacter luteus
MSKANAKYSFVDLFAGIGGFHAALAATGGVCEYAVEIDREAAAVYERNWNKPALGDITDDANDEGVTLRGYDGPIDVLTGGFPCQPFSKSGAQHGMAETRGTLFWNIARIIEEREPTVLILENVRNLVGPRHRHEWLTIIETLRFFGYEVSGAPAIFSPHLLPAWMGGTPQVRERVFITATLVPERMRDERIPRTETGEIDAEAIGPKPVATMNDRFPIKKGGTELFHPGDRKSGWNLLTSGIIREGDPEPSNVDLRLTETETLWIDAWDDLESTIRRATGRPLEGFPYWADSWTDFRELSRLVVIRGFQAPEREVVGDRKRYVARTDMPEGFVPASVTRPAIDETLPAWKQSHLRRNYDFFERHFAEVVAWAYRWGVYTDLFPASRRKLEWQAQDAPRLWDTVMHFRPSGIRAKRPTYLPALVAITQTSIVGPLERRLSPRETARLQGLPEWFDFGEQRAAATYKQMGNGVNVGVVRHILREHVRRDRALLKLTPAGQRIINAVLADEPDATVGALGAAE

SEQ ID NO: 608 - protein, 330 aa, Haemophilus aegyptius
MNLISLFSGAGGLDLGFQKAGFRIICANEYDKSIWKTYESNHSAKLIKGDISKISSDEFPKCDGIIGGPPCQSWSEGGSLRGIDDPRGKLFYEYIRILKQKKPIFFLAENVKGMMAQRHNKAVQEFIQEFDNAGYDVHIILLNANDYGVAQDRKRVFYIGFRKELNINYLPPIPHLIKPTFKDVIWDLKDNPIPALDKNKTNGNKCIYPNHEYFIGSYSTIFMSRNRVRQWNEPAFTVQASGRQCQLHPQAPVMLKVSKNLNKFVEGKEHLYRRLTVRECARVQGFPDDFIFHYESLNDGYKMIGNAVPVNLAYEIAKTIKSALEICKGN

SEQ ID NO: 609 - protein, 327 aa, Haemophilus haemolyticus
MIEIKDKQLTGLRFIDLFAGLGGFRLALESCGAECVYSNEWDKYAQEVYEMNFGEKPEGDITQVNEKTIPDHDILCAGFPCQAFSISGKQKGFEDSRGTLFFDIARIVREKKPKVVFMENVKNFASHDNGNTLEVVKNTMNELDYSFHAKVLNALDYGIPQKRERIYMICFRNDLNIQNFQFPKPFELNTFVKDLLLPDSEVEHLVIDRKDLVMTNQEIEQTTPKTVRLGIVGKGGQGERIYSTRGIAITLSAYGGGIFAKTGGYLVNGKTRKLHPRECARVMGYPDSYKVHPSTSQAYKQFGNSVVINVLQYIAYNIGSSLNFKPY

SEQ ID NO: 610 - protein, 418 aa, unidentified
  source 1..418: note = Moraxella
MKPEILKLIRSKLDLTQKQASEIIEVSDKTWQQWESGKTEMHPAYYSFLQEKLKDKINFEELSAQKTLQKKIFDKYNQNQITKNAEELAEITHIEERKDAYSSDFKFIDLFSGIGGIRQSFEVNGGKCVFSSEIDPFAKFTYYTNFGVVPFGDITKVEATTIPQHDILCAGFPCQPFSHIGKREGFEHPTQGTMFHEIVRIIETKKTPVLFLENVPGLINHDDGNTLKVIIETLEDMGYKVHHTVLDASHFGIPQKRKRFYLVAFLNQNIHFEFPKPPMISKDIGEVLESDVTGYSISEHLQKSYLFKKDDGKPSLIDKNTTGAVKTLVSTYHKIQRLTGTFVKDGETGIRLLTTNECKAIMGFPKDFVIPVSRTQMYRQMGNSVVVPVVTKIAEQISLALKTVNQQSPQENFELELV

SEQ ID NO: 611 - protein, 537 aa, unidentified
  source 1..537: note = Ascobolus
MSERRYEAGMTVALHEGSFLKIQRVYIRQYHADNRREHMLVGPLFRRTKYLKALSKKVNEVAIVHESIHVPVQDVIGVRELIITNRPFPECRKGDEHTGRLVCRWVYNLDERAKGREYKKQRYIRRITEAEADPEYRVEDRVLRRRWFQEGYIGDEISYKEHGNGDIVDIRSESPLQVLDGWGGDLVDLENGEETSIPGPCRSASSYGRLMKPPLAQAADSNTSRKYTFGDTFCGGGGVSLGARQAGLEVKWAFDMNPNAGANYRRNFPNTDFFLAEAEQFIQLSVGISQHVDILHLSPPCQTFSRAHTIAGKNDENNEASFFAVVNLIKAVRPRLFTVEETDGIMDRQSRQFIDTALMGITELGYSFRICVLNAIEYGVCQNRKRLIIIGAAPGEELPPFPLPTHQDFFSKDPRRDLLPAVTLDDALSTITPESTDHHLNHVWQPAEWKTPYDAHRPFKNAIRAGGGEYDIYPDGRRKFTVRELACIQGFPDEYEFVGTLTDKRRIIGNAVPPPLSAAIMSTLRQWMTEKDFERME

SEQ ID NO: 612 - protein, 1534 aa, Arabidopsis sp.
MVENGAKAAKRKKRPLPEIQEVEDVPRTRRPRRAAACTSFKEKSIRVCEKSATIEVKKQQIVEEEFLALRLTALETDVEDRPTRRLNDFVLFDSDGVPQPLEMLEIHDIFVSGAILPSDVCTDKEKEKGVRCTSFGRVEHWSISGYEDGSPVIWISTELADYDCRKPAASYRKVYDYFYEKARASVAVYKKLSKSSGGDPDIGLEELLAAVVRSMSSGSKYFSSGAAIIDFVISQGDFIYNQLAGLDETAKKHESSYVEIPVLVALREKSSKIDKPLQRERNPSNGVRIKEVSQVAESEALTSDQLVDGTDDDRRYAILLQDEENRKSMQQPRKNSSSGSASNMFYIKINEDEIANDYPLPSYYKTSEEETDELILYDASYEVQSEHLPHRMLHNWALYNSDLRFISLELLPMKQCDDIDVNIFGSGVVTDDNGSWISLNDPDSGSQSHDPDGMCIFLSQIKEWMIEFGSDDIISISIRTDVAWYRLGKPSKLYAPWWKPVLKTARVGISILTFLRVESRVARLSFADVTKRLSGLQANDKAYISSDPLAVERYLVVHGQIILQLFAVYPDDNVKRCPFVVGLASKLEDRHHTKWIIKKKKISLKELNLNPRAGMAPVASKRKAMQATTTRLVNRIWGEFYSNYSPEDPLQATAAENGEDEVEEEGGNGEEEVEEEGENGLTEDTVPEPVEVQKPHTPKKIRGSSGKREIKWDGESLGKTSAGEPLYQQALVGGEMVAVGGAVTLEVDDPDEMPAIYFVEYMFESTDHCKMLHGRFLQRGSMTVLGNAANERELFLTNECMTTQLKDIKGVASFEIRSRPWGHQYRKKNITADKLDWARALERKVKDLPTEYYCKSLYSPERGGFFSLPLSDIGRSSGFCTSCKIREDEEKRSTIKLNVSKTGFFINGIEYSVEDFVYVNPDSIGGLKEGSKTSFKSGRNIGLRAYVVCQLLEIVPKESRKADLGSFDVKVRRFYRPEDVSAEKAYASDIQELYFSQDTVVLPPGALEGKCEVRKKSDMPLSREYPISDHIFFCDLFFDTSKGSLKQLPANMKPKFSTIKDDTLLRKKKGKGVESEIESEIVKPVEPPKEIRLATLDIFAGCGGLSHGLKKAGVSDAKWAIEYEEPAGQAFKQNHPESTVFVDNCNVILRAIMEKGGDQDDCVSTTEANELAAKLTEEQKSTLPLPGQVDFINGGPPCQGFSGMNRFNQSSWSKVQCEMILAFLSFADYFRPRYFLLENVRTFVSFNKGQTFQLTLASLLEMGYQVRFGILEAGAYGVSQSRKRAFIWAAAPEEVLPEWPEPMHVFGVPKLKISLSQGLHYAAVRSTALGAPFRPITVRDTIGDLPSVENGDSRTNKEYKEVAVSWFQKEIRGNTIALTDHICKAMNELNLIRCKLIPTRPGADWHDLPKRKVTLSDGRVEEMIPFCLPNTAERHNGWKGLYGRLDWQGNFPTSVTDPQPMGKVGMCFHPEQHRILTVRECARSQGFPDSYEFAGNINHKHRQIGNAVPPPLAFALGRKLKEALHLKKSPQHQP

SEQ ID NO: 613 - protein, 1356 aa, unidentified
  source 1..1356: note = Ascobolus
MELTPELSGVSTDLGGGGSIFAHWRMKEESPAPTEILDDLNVLEWEKTTRDYSKEDLRIADQLFSIEDEHQSLPFETADAEDGTPTEEEEEKELPMRTLDNFVLYDASDLELAALDLIGTELNIHAVGTVGPIYTEGEEDEQEDEDEDVSPPVRTGTQATSASVTQMTVELYIRNIVQYEFCFNDDGTVETWIQTTNAHYKLLQPAKCYTSLYRPVNDCLNVITAIITLAPESTTMSLKDLLKVMDDKAQAVSYEEVERMSEFIVQHLDQWMETAPKKKSKLIEKSKVYIDLNNLAGIDMVSGVRPPPVRRVTGRSSAPKKRIVRNMNDAVLLHQNETTVTNWIHQLSAGMFGRALNVLGAETADVENLTCDPASAKFVVPQRRLHKRLKWETRGHIPVSEEEYKHIYQGKKYAKFFEAVRAVDESKLTIKLGDLVYVLDQDPKVTQTQFATAGREGRKKGAEKEKIQVRFGRVLSIRQPDSNSKDAQNVFIHVQWLVLGCDTILQEMASRRELFLTDSCDTVFADVIYGVAKLTPLGAKDIPTVEFHESMATMMGENEFFVRFKYNYQDGSFTDLKDVDAEQIGTLQPRVNTHRNPGYCSNCRIKYDNERTGDKWIYENDTEGEPRLFRSSKGWCIYAQEFVYLQPVEKQPGTTFRVGYISEINKSSVIVELLARVDDDDKSGHISYSDPRHLYFTGTDIKVTFDKIIRKCFVFHDSGDQKAKAPLMYGTLQRDLYYYRYEKRKGKAELVPVREIRSIHEQTLNDWESRTQIERHGAVSGKKLKGLDIFAGCGGLTLGLDLSGAVDTKWDIEFAPSAANTLALNFPDAQVFNQCANVLLSRAIQSEDEGSLDIEYDLQGRVLPDLPKKGEVDFIYGGPPCQGFSGVNRYKKGNDIKNSLVATFLSYVDHYKPRFVLLENVKGLITTKLGNSKNAEGKWEGGISNGVVKFIYRTLISMNYQCRIGLVQSGEYGVPQSRPRVIFLAARMGERLPDLPEPMHAFEVLDSQYALPHIKRYHTTQNGVAPLPRITIGEAVSDLPKFQYANPGVWPRHDPYSSAKAQPSDKTIEKFSVSKATSFVGYLLQPYHSRPQSEFQRRLRTKLVPSDEPAEKTSLLTTKLVTAHVTRLFNKETTQRIVCVPMWPGADHRSLPKEMRPWCLVDPNSQAEKHRFWPGLFGRLGMEDFFSTALTDVQPCGKQGKVLHPTQRRVYTVRELARAQGFPDWFAFTDGDADSGLGGVKKWHRNIGNAVPVPLGEQIGRCIGYSVWWKDDMIAQLREDGADEDEEMIDGNDQWVEELNTQMAADMPGLPLLVTHLLNLCVYRRLYGPNAKEFLPARVYDKKLEGGRRRLVWAML

SEQ ID NO: 614 - protein, 1454 aa, unidentified
  source 1..1454: note = Neurospora
MDSPDRSHGGMFIDVPAETMGFQEDYLDMFASVLSQGLAKEGDYAHHQPLPAGKEECLEPIAVATTITPSPDDPQLQLQLELEQQFQTESGLNGVDPAPAPESEDEADLPDGFSDESPDDDFVVQRSKHITVDLPVSTLINPRSTFQRIDENDNLVPPPQSTPERVAVEDLLKAAKAAGKNKEDYIEFELHDFNFYVNYAYHPQEMRPIQLVATKVLHDKYYFDGVLKYGNTKHYVTGMQVLELPVGNYGASLHSVKGQIWVRSKHNAKKEIYYLLKKPAFEYQRYYQPFLWIADLGKHVVDYCTRMVERKREVTLGCFKSDFIQWASKAHGKSKAFQNWRAQHPSDDFRTSVAANIGYIWKEINGVAGAKRAAGDQLFRELMIVKPGQYFRQEVPPGPVVTEGDRTVAATIVTPYIKECFGHMILGKVLRLAGEDAEKEKEVKLAKRLKIENKNATKADTKDDMKNDTATESLPTPLRSLPVQVLEATPIESDIVSIVSSDLPPSENNPPPLTNGSVKPKAKANPKPKPSTQPLHAAHVKYLSQELVNKIKVGDVISTPRDDSSNTDTKWKPTDTDDHRWFGLVQRVHTAKTKSSGRGLNSKSFDVIWFYRPEDTPCCAMKYKWRNELFLSNHCTCQEGHHARVKGNEVLAVHPVDWFGTPESNKGEFFVRQLYESEQRRWITLQKDHLTCYHNQPPKPPTAPYKPGDTVLATLSPSDKFSDPYEVVEYFTQGEKETAFVRLRKLLRRRKVDRQDAPANELVYTEDLVDVRAERIVGKCIMRCFRPDERVPSPYDRGGTGNMFFITHRQDHGRCVPLDTLPPTLRQGFNPLGNLGKPKLRGMDLYCGGGNFGRGLEEGGVVEMRWANDIWDKAIHTYMANTPDPNKTNPFLGSVDDLLRLALEGKFSDNVPRPGEVDFIAAGSPCPGFSLLTQDKKVLNQVKNQSLVASFASFVDFYRPKYGVLENVSGIVQTFVNRKQDVLSQLFCALVGMGYQAQLILGDAWAHGAPQSRERVFLYFAAPGLPLPDPPLPSHSHYRVKNRNIGFLCNGESYVQRSFIPTAFKFVSAGEGTADLPKIGDGKPDACVRFPDHRLASGITPYIRAQYACIPTHPYGMNFIKAWNNGNGVMSKSDRDLFPSEGKTRTSDASVGWKRLNPKTLFPTVTTTSNPSDARMGPGLHWDEDRPYTVQEMRRAQGYLDEEVLVGRTTDQWKLVGNSVSRHMALAIGLKFREAWLGTLYDESAVVATATATATTAAAVGVTVPVMEEPGIGTTESSRPSRSPVHTAVDLDDSKSERSRSTTPATVLSTSSAAGDGSANAAGLEDDDNDDMEMMEVTRKRSSPAVDEEGMRPSKVQKVEVTVASPASRRSSRQASRNPTASPSSKASKATTHEAPAPEELESDAESYSETYDKEGFDGDYHSGHEDQYSEEDEEEEYAEPETMTVNGMTIVKL

SEQ ID NO: 615 - protein, 345 aa, unidentified
  source 1..345: note = Drosophila
MVFRVLELFSGIGGMHYAFNYAQLDGQIVAALDVNTVANAVYAHNYGSNLVKTRNIQSLSVKEVTKLQANMLLMSPPCQPHTRQGLQRDTEDKRSDALTHLCGLIPECQELEYILMENVKGFESSQARNQFIESLERSGFHWREFILTPTQFNVPNTRYRYYCIARKGADFPFAGGKIWEEMPGAIAQNQGLSQIAEIVEENVSPDFLVPDDVLTKRVLVMDIIHPAQSRSMCFTKGYTHYTEGTGSAYTPLSEDESHRIFELVKEIDTSNQDASKSEKILQQRLDLLHQVRLRYFTPREVARLMSFPENFEFPPETTNRQKYRLLGNSINVKVVGELIKLLTIK

SEQ ID NO: 616 - protein, 330 aa, unidentified
  source 1..330: note = S. pombe
MLSTKRLRVLELYSGIGGMHYALNLANIPADIVCAIDINPQANEIYNLNHGKLAKHMDISTLTAKDFDAFDCKLWTMSPSCQPFTRIGNRKDILDPRSQAFLNILNVLPHVNNLPEYILIENVQGFEESKAAEECRKVLRNCGYNLIEGILSPNQFNIPNSRSRWYGLARLNFKGEWSIDDVFQFSEVAQKEGEVKRIRDYLEIERDWSSYMVLESVLNKWGHQFDIVKPDSSSCCCFTRGYTHLVQGAGSILQMSDHENTHEQFERNRMALQLRYFTAREVARLMGFPESLEWSKSNVTEKCMYRLLGNSINVKVVSYLISLLLEPLNF

SEQ ID NO: 617 - protein, 624 aa, Arabidopsis sp.
MVMSHIFLISQIQEVEHGDSDDVNWNTDDDELAIDNFQFSPSPVHISATSPNSIQNRISDETVASFVEMGFSTQMIARAIEETAGANMEPMMILETLFNYSASTEASSSKSKVINHFIAMGFPEEHVIKAMQEHGDEDVGEITNALLTYAEVDKLRESEDMNININDDDDDNLYSLSSDDEEDELNNSSNEDRILQALIKMGYLREDAAIAIERCGEDASMEEVVDFICAAQMARQFDEIYAEPDKKELMNNNKKRRTYTETPRKPNTDQLISLPKEMIGFGVPNHPGLMMHRPVPIPDIARGPPFFYYENVAMTPKGVWAKISSHLYDIVPEFVDSKHFCAAARKRGYIHNLPIQNRFQIQPPQHNTIQEAFPLTKRWWPSWDGRTKLNCLLTCIASSRLTEKIREALERYDGETPLDVQKWVMYECKKWNLVWVGKNKLAPLDADEMEKLLGFPRDHTRGGGISTTDRYKSLGNSFQVDTVAYHLSVLKPLFPNGINVLSLFTGIGGGEVALHRLQIKMNVVVSVEISDANRNILRSFWEQTNQKGILREFKDVQKLDDNTIERLMDEYGGFDLVIGGSPCNNLAGGNRHHRVGLGGEHSSLFFDYCRILEAVRRKARHMRR

SEQ ID NO: 618 - protein, 626 aa, Arabidopsis sp.
MVIWNNDDDDFLEIDNFQSSPRSSPIHAMQCRVENLAGVAVTTSSLSSPTETTDLVQMGFSDEVFATLFDMGFPVEMISRAIKETGPNVETSVIIDTISKYSSDCEAGSSKSKAIDHFLAMGFDEEKVVKAIQEHGEDNMEAIANALLSCPEAKKLPAAVEEEDGIDWSSSDDDTNYTDMLNSDDEKDPNSNENGSKIRSLVKMGFSELEASLAVERCGENVDIAELTDFLCAAQMAREFSEFYTEHEEQKPRHNIKKRRFESKGEPRSSVDDEPIRLPNPMIGFGVPNEPGLITHRSLPELARGPPFFYYENVALTPKGVWETISRHLFEIPPEFVDSKYFCVAARKRGYIHNLPINNRFQIQPPPKYTIHDAFPLSKRWWPEWDKRTKLNCILTCTGSAQLTNRIRVALEPYNEEPEPPKHVQRYVIDQCKKWNLVWVGKNKAAPLEPDEMESILGFPKNHTRGGGMSRTERFKSLGNSFQVDTVAYHLSVLKPIFPHGINVLSLFTGIGGGEVALHRLQIKMKLVVSVEISKVNRNILKDFWEQTNQTGELIEFSDIQHLTNDTIEGLMEKYGGFDLVIGGSPCNNLAGGNRVSRVGLEGDQSSLFFEYCRILEVVRARMRGS

SEQ ID NO: 619 - protein, 791 aa, Arabidopsis sp.
MAARNKQKKRAEPESDLCFAGKPMSVVESTIRWPHRYQSKKTKLQAPTKKPANKGGKKEDEEIIKQAKCHFDKALVDGVLINLNDDVYVTGLPGKLKFIAKVIELFEADDGVPYCRFRWYYRPEDTLIERFSHLVQPKRVFLSNDENDNPLTCIWSKVNIAKVPLPKITSRIEQRVIPPCDYYYDMKYEVPYLNFTSADDGSDASSSLSSDSALNCFENLHKDEKFLLDLYSGCGAMSTGFCMGASISGVKLITKWSVDINKFACDSLKLNHPETEVRNEAAEDFLALLKEWKRLCEKFSLVSSTEPVESISELEDEEVEENDDIDEASTGAELEPGEFEVEKFLGIMFGDPQGTGEKTLQLMVRWKGYNSSYDTWEPYSGLGNCKEKLKEYVIDGFKSHLLPLPGTVYTVCGGPPCQGISGYNRYRNNEAPLEDQKNQQLLVFLDIIDFLKPNYVLMENVVDLLRFSKGFLARHAVASFVAMNYQTRLGMMAAGSYGLPQLRNRVFLWAAQPSEKLPPYPLPTHEVAKKFNTPKEFKDLQVGRIQMEFLKLDNALTLADAISDLPPVTNYVANDVMDYNDAAPKTEFENFISLKRSETLLPAFGGDPTRRLFDHQPLVLGDDDLERVSYIPKQKGANYRDMPGVLVHNNKAEINPRFRAKLKSGKNVVPAYAISFIKGKSKKPFGRLWGDEIVNTVVTRAEPHNQCVIHPMQNRVLSVRENARLQGFPDCYKLCGTIKEKYIQVGNAVAVPVGVALGYAFGMASQGLTDDEPVIKLPFKYPECMQAKDQI

SEQ ID NO: 620 - protein, 1295 aa, Arabidopsis sp.
MLSPAKCESEEAQAPLDLHSSSRSEPECLSLVLWCPNPEEAAPSSTRELIKLPDNGEMSLRRSTTLNCNSPEENGGEGRVSQRKSSRGKSQPLLMLTNGCQLRRSPRFRALHANFDNVCSVPVTKGGVSQRKFSRGKSQPLLTLTNGCQLRRSPRFRAVDGNFDSVCSVPVTGKFGSRKRKSNSALDKKESSDSEGLTFKDIAVIAKSLEMEIISECQYKNNVAEGRSRLQDPAKRKVDSDTLLYSSINSSKQSLGSNKRMRRSQRFMKGTENEGEENLGKSKGKGMSLASCSFRRSTRLSGTVETGNTETLNRRKDCGPALCGAEQVRGTERLVQISKKDHCCEAMKKCEGDGLVSSKQELLVFPSGCIKKTVNGCRDRTLGKPRSSGLNTDDIHTSSLKISKNDTSNGLTMTTALVEQDAMESLLQGKTSACGAADKGKTREMHVNSTVIYLSDSDEPSSIEYLNGDNLTQVESGSALSSGGNEGIVSLDLNNPTKSTKRKGKRVTRTAVQEQNKRSICFFIGEPLSCEEAQERWRWRYELKERKSKSRGQQSEDDEDKIVANVECHYSQAKVDGHTFSLGDFAYIKGEEEETHVGQIVEFFKTTDGESYFRVQWFYRATDTIMERQATNHDKRRLFYSTVMNDNPVDCLISKVTVLQVSPRVGLKPNSIKSDYYFDMEYCVEYSTFQTLRNPKTSENKLECCADVVPTESTESILKKKSFSGELPVLDLYSGCGGMSTGLSLGAKISGVDVVTKWAVDQNTAACKSLKLNHPNTQVRNDAAGDFLQLLKEWDKLCKRYVFNNDQRTDTLRSVNSTKETSGSSSSSDDDSDSEEYEVEKLVDICFGDHDKTGKNGLKFKVHWKGYRSDEDTWELAEELSNCQDAIREFVTSGFKSKILPLPGRVGVICGGPPCQGISGYNRHRNVDSPLNDERNQQIIVFMDIVEYLKPSYVLMENVVDILRMDKGSLGRYALSRLVNMRYQARLGIMTAGCYGLSQFRSRVFMWGAVPNKNLPPFPLPTHDVIVRYGLPLEFERNVVAYAEGQPRKLEKALVLKDAISDLPHVSNDEDREKLPYESLPKTDFQRYIRSTKRDLTGSAIDNCNKRTMLLHDHRPFHINEDDYARVCQIPKRKGANFRDLPGLIVRNNTVCRDPSMEPVILPSGKPLVPGYVFTFQQGKSKRPFARLWWDETVPTVLTVPTCHSQALLHPEQDRVLTIRESARLQGFPDYFQFCGTIKERYCQIGNAVAVSVSRALGYSLGMAFRGLARDEHLIKLPQNFSHSTYPQLQETIPH

SEQ ID NO: 621 - protein, 839 aa, Arabidopsis sp.
MAPKRKRPATKDDTTKSIPKPKKRAPKRAKTVKEEPVTVVEEGEKHVARFLDEPIPESEAKSTWPDRYKPIEVQPPKASSRKKTKDDEKVEIIRARCHYRRAIVDERQIYELNDDAYVQSGEGKDPFICKIIEMFEGANGKLYFTARWFYRPSDTVMKEFEILIKKKRVFFSEIQDTNELGLLEKKLNILMIPLNENTKETIPATENCDFFCDMNYFLPYDTFEAIQQETMMAISESSTISSDTDIREGAAAISEIGECSQETEGHKKATLLDLYSGCGAMSTGLCMGAQLSGLNLVTKWAVDMNAHACKSLQHNHPETNVRNMTAEDFLFLLKEWEKLCIHFSLRNSPNSEEYANLHGLNNVEDNEDVSEESENEDDGEVFTVDKIVGISFGVPKKLLKRGLYLKVRWLNYDDSHDTWEPIEGLSNCRGKIEEFVKLGYKSGILPLPGGVDVVCGGPPCQGISGHNRFRNLLDPLEDQKNKQLLVYMNIVEYLKPKFVLMENVVDMLKMAKGYLARFAVGRLLQMNYQVRNGMMAAGAYGLAQFRLRFFLWGALPSEIIPQFPLPTHDLVHRGNIVKEFQGNIVAYDEGHTVKLADKLLLKDVISDLPAVANSEKRDEITYDKDPTTPFQKFIRLRKDEASGSQSKSKSKKHVLYDHHPLNLNINDYERVCQVPKRKGANFRDFPGVIVGPGNVVKLEEGKERVKLESGKTLVPDYALTYVDGKSCKPFGRLWWDEIVPTVVTRAEPHNQVIIHPEQNRVLSIRENARLQGFPDDYKLFGPPKQKYIQVGNAVAVPVAKALGYALGTAFQGLAVGKDPLLTLPEGFAFMKPTLPSELA

SEQ ID NO: 622 - protein, 142 aa, unidentified
  source 1..142: note = Neurospora
MAEQNPFVIDDEDDVIQIHDEEEVEEEVAEVIDITEDDIEPSELDRAFGSRPKEETLPSLLLRDQGFIVRPGMTVELKAPIGRFAISFVRVNSIVKVRQAHVNNVTIRGHGFTRAKEMNGMLPKQLNECCLVASIDTRDPRP

SEQ ID NO: 623 - protein, 529 aa, Escherichia coli
MNNNDLVAKLWKLCDNLRDGGVSYQNYVNELASLLFLKMCKETGQEAEYLPEGYRWDDLKSRIGQEQLQFYRKMLVHLGEDDKKLVQAVFHNVSTTITEPKQITALVSNMDSLDWYNGAHGKSRDDFGDMYEGLLQKNANETKSGAGQYFTPRPLIKTIIHLLKPQPREVVQDPAAGTAGFLIEADRYVKSQTNDLDDLDGDTQDFQIHRAFIGLELVPGTRRLALMNCLLHDIEGNLDHGGAIRLGNTLGSDGENLPKAHIVATNPPFGSAAGTNITRTFVHPTSNKQLCFMQHIIETLHPGGRAAVVVPDNVLFEGGKGTDIRRDLMDKCHLHTILRLPTGIFYAQGVKTNVLFFTKGTVANPNQDKNCTDDVWVYDLRTNMPSFGKRTPFTDEHLQPFERVYGEDPHGLSPRTEGEWSFNAEETEVADSEENKNTDQHLATSRWRKFSREWIRTAKSDSLDISWLKDKDSIDADSLPEPDVLAAEAMGELVQALSELDALMRELGASDEADLQRQLLEEAFGGVKE

SEQ ID NO: 624 - protein, 464 aa, Escherichia coli
MSAGKLPEGWVIAPVSTVTTLIRGVTYKKEQAINYLKDDYLPLIRANNIQNGKFDTTDLVFVPKNLVKESQKISPEDIVIAMSSGSKSVVGKSAHQHLPFECSFGAFCGVLRPEKLIFSGFIAHFTKSSLYRNKISSLSAGANINNIKPASFDLINIPIPPLAEQKIIAEKLDTLLAQVDSTKARFEQIPQILKRFRQAVLGGAVNGKLTEKWRNFEPQHSVFKKLNFESILTELRNGLSSKPNESGVGHPILRISSVRAGHVDQNDIRFLECSESELNRHKLQDGDLLFTRYNGSLEFVGVCGLLKKLQHQNLLYPDKLIRARLTKDALPEYIEIFFSSPSARNAMMNCVKTTSGQKGISGKDIKSQVVLLPPVKEQAEIVRRVEQLFAYADTIEKQVNNALARVNNLTQSILAKAFRGELTAQWRAENPDLISGENSAAALLEKIKAERAASGGKKASRKKS

SEQ ID NO: 625 - protein, 421 aa, unidentified
  source 1..421: note = Bacteria (Thermus aquaticus)
MGLPPLLSLPSNSAPRSLGRVETPPEVVDFMVSLAEAPRGGRVLEPACAHGPFLRAFREAHGTAYRFVGVEIDPKALDLPPWAEGILADFLLWEPGEAFDLILGNPPYGIVGEASKYPIHVFKAVKDLYKKAFSTWKGKYNLYGAFLEKAVRLLKPGGVLVFVVPATWLVLEDFALLREFLAREGKTSVYYLGEVFPQKKVSAVVIRFQKSGKGLSLWDTQESESGFTPILWAEYPHWEGEIIRFETEETRKLEISGMPLGDLFHIRFAARSPEFKKHPAVRKEPGPGLVPVLTGRNLKPGWVDYEKNHSGLWMPKERAKELRDFYATPHLVVAHTKGTRVVAAWDERAYPWREEFHLLPKEGVRLDPSSLVQWLNSEAMQKHVRTLYRDFVPHLTLRMLERLPVRREYGFHTSPESARNF

SEQ ID NO: 626 - protein, 278 aa, Escherichia coli
MKKNRAFLKWAGGKYPLLDDIKRHLPKGECLVEPFVGAGSVFLNTDFSRYILADINSDLISLYNIVKMRTDEYVQAARELFVPETNCAEVYYQFREEFNKSQDPFRRAVLFLYLNRYGYNGLCRYNLRGEFNVPFGRYKKPYFPEAELYHFAEKAQNAFFYCESYADSMARADDASVVYCDPPYAPLSATANFTAYHTNSFTLEQQAHLAEIAEGLVERHIPVLISNHDTMLTREWYQRAKLHVVKVRRSISSNGGTRKKVDELLALYKPGVVSPAKK

SEQ ID NO: 627 - protein, 358 aa, unidentified
  source 1..358: note = Caulobacter crescentus
MKFGPETIIHGDCIEQMNALPEKSVDLIFADPPYNLQLGGDLLRPDNSKVDAVDDHWDQFESFAAYDKFTREWLKAARRVLKDDGAIWVIGSYHNIFRVGVAVQDLGFWILNDIVWRKSNPMPNFKGTRFANAHETLIWASKSQNAKRYTFNYDALKMANDEVQMRSDWTIPLCTGEERIKGADGQKAHPTQKPEALLYRVILSTTKPGDVILDPFFGVGTTGAAAKRLGRKFIGIEREAEYLEHAKARIAKVVPIAPEDLDVMGSKRAEPRVPFGTIVEAGLLSPGDTLYCSKGTHVAKVRPDGSITVGDLSGSIHKIGALVQSAPACNGWTYWHFKTDAGLAPIDVLRAQVRAGMN

SEQ ID NO: 628 - protein, 577 aa, unidentified
  source 1..577: note = Clostridioides difficile
MDDISQDNFLLSKEYENSLDVDTKKASGIYYTPKIIVDYIVKKTLKNHDIIKNPYPRILDISCGCGNFLLEVYDILYDLFEENIYELKKKYDENYWTVDNIHRHILNYCIYGADIDEKAISILKDSLTNKKVVNDLDESDIKINLFCCDSLKKKWRYKFDYIVGNPPYIGHKKLEKKYKKFLLEKYSEVYKDKADLYFCFYKKIIDILKQGGIGSVITPRYFLESLSGKDLREYIKSNVNVQEIVDFLGANIFKNIGVSSCILTFDKKKTKETYIDVFKIKNEDICINKFETLEELLKSSKFEHFNINQRLLSDEWILVNKDDETFYNKIQEKCKYSLEDIAISFQGIITGCDKAFILSKDDVKLNLVDDKFLKCWIKSKNINKYIVDKSEYRLIYSNDIDNENTNKRILDEIIGLYKTKLENRRECKSGIRKWYELQWGREKLFFERKKIMYPYKSNENRFAIDYDNNFSSADVYSFFIKEEYLDKFSYEYLVGILNSSVYDKYFKITAKKMSKNIYDYYPNKVMKIRIFRDNNYEEIENLSKQIISILLNKSIDKGKVEKLQIKMDNLIMDSLGI

SEQ ID NO: 629 - protein, 835 aa, Synthetic construct
MAASAAAASAAAASAASGSPGPGEGSAGGEKRSTAPSAAASASASAAASSPAGGGAEALELLEHCGVCRERLRPEREPRLLPCLHSACSACLGPAAPAAANSSGDGGAAGDGTVVDCPVCKQQCFSKDIVENYFMRDSGSKAATDAQDANQCCTSCEDNAPATSYCVECSEPLCETCVEAHQRVKYTKDHTVRSTGPAKSRDGERTVYCNVHKHEPLVLFCESCDTLTCRDCQLNAHKDHQYQFLEDAVRNQRKLLASLVKRLGDKHATLQKSTKEVRSSIRQVSDVQKRVQVDVKMAILQIMKELNKRGRVLVNDAQKVTEGQQERLERQHWTMTKIQKHQEHILRFASWALESDNNTALLLSKKLIYFQLHRALKMIVDPVEPHGEMKFQWDLNAWTKSAEAFGKIVAERPGTNSTGPAPMAPPRAPGPLSKQGSGSSQPMEVQEGYGFGSGDDPYSSAEPHVSGVKRSRSGEGEVSGLMRKVPRVSLERLDLDLTADSQPPVFKVFPGSTTEDYNLIVIERGAAAAATGQPGTAPAGTPGAPPLAGMAIVKEEETEAAIGAPPTATEGPETKPVLMALAEGPGAEGPRLASPSGSTSSGLEVVAPEGTSAPGGGPGTLDDSATICRVCQKPGDLVMCNQCEFCFHLDCHLPALQDVPGEEWSCSLCHVLPDLKEEDGSLSLDGADSTGVVAKLSPANQRKCERVLLALFCHEPCRPLHQLATDSTFSLDQPGGTLDLTLIRARLQEKLSPPYSSPQEFAQDVGRMFKQFNKLTEDKADVQSIIGLQRFFETRMNEAFGDTKFSAVLVEPPPMSLPGAGLSSQELSGGPGDGP

SEQ ID NO: 630 - protein, 486 aa, Synthetic construct
MVAGMLGLREEKSEDQDLQGLKDKPLKFKKVKKDKKEEKEGKHEPVQPSAHHSAEPAEAGKAETSEGSGSAPAVPEASASPKQRRSIIRDRGPMYDDPTLPEGWTRKLKQRKSGRSAGKYDVYLINPQGKAFRSKVELIAYFEKVGDTSLDPNDFDFTVTGRGSPSRREQKPPKKPKSPKAPGTGRGRGRPKGSGTTRPKAATSEGVQVKRVLEKSPGKLLVKMPFQTSPGGKAEGGGATTSTQVMVIKRPGRKRKAEADPQAIPKKRGRKPGSVVAAAAAEAKKKAVKESSIRSVQETVLPIKKRKTRETVSIEVKEVVKPLLVSTLGEKSGKGLKTCKSPGRKSKESSPKGRSSSASSPPKKEHHHHHHHSESPKAPVPLLPPLPPPPPEPESSEDPTSPPEPQDLSSSVCKEEKMPRGGSLESDGCPKEPAKTQPAVATAATAAEKYKHRGEGERKDIVSSSMPRPNREEPVDSRTPVTERVS

SEQ ID NO: 631 - protein, 4 aa, Synthetic construct
SGGS

SEQ ID NO: 632 - protein, 24 aa, Synthetic construct
SGGSSGSETPGTSESATPESSGGS

SEQ ID NO: 633 - protein, 32 aa, Synthetic construct
SGGSSGGSSGSETPGTSESATPESSGGSSGGS

SEQ ID NO: 634 - protein, 104 aa, Synthetic construct
GGSGGSPGSPAGSPTSTEEGTSESATPESGPGTSTEPSEGSAPGSPAGSPTSTEEGTSTEPSEGSAPGTSTEPSEGSAPGTSESATPESGPGSEPATSGGSGGS

SEQ ID NO: 635 - protein, 5 aa, Synthetic construct
GSGGG

SEQ ID NO: 636 - protein, 20 aa, Synthetic construct
GGGGSGGGGSGGGGSGGGGS

SEQ ID NO: 637 - protein, 27 aa, Synthetic construct
SSGNSNANSRGPSFSSGLVPLSLRGSH

SEQ ID NO: 638 - protein, 16 aa, Synthetic construct
SGSETPGTSESATPES

SEQ ID NO: 639 - protein, 24 aa, Synthetic construct
SGGSSGGSSGSETPGTSESATPES

SEQ ID NO: 640 - protein, 40 aa, Synthetic construct
SGGSSGGSSGSETPGTSESATPESSGGSSGGSSGGSSGGS

SEQ ID NO: 641 - protein, 64 aa, Synthetic construct
SGGSSGGSSGSETPGTSESATPESSGGSSGGSSGGSSGGSSGSETPGTSESATPESSGGSSGGS

SEQ ID NO: 642 - protein, 92 aa, Synthetic construct
PGSPAGSPTSTEEGTSESATPESGPGTSTEPSEGSAPGSPAGSPTSTEEGTSTEPSEGSAPGTSTEPSEGSAPGTSESATPESGPGSEPATS

SEQ ID NO: 643 - protein, 80 aa, Synthetic construct
GGPSSGAPPPSGGSPAGSPTSTEEGTSESATPESGPGTSTEPSEGSAPGSPAGSPTSTEEGTSTEPSEGSAPGTSTEPSE

SEQ ID NO: 644 - protein, 7 aa, Synthetic construct
PKKKRKV

SEQ ID NO: 645 - protein, 20 aa, Synthetic construct
AVKRPAATKKAGQAKKKKLD

SEQ ID NO: 646 - protein, 25 aa, Synthetic construct
MSRRRKANPTKLSENAKKLAKEVEN

SEQ ID NO: 647 - protein, 9 aa, Synthetic construct
PAAKRVKLD

SEQ ID NO: 648 - protein, 9 aa, Synthetic construct
KLKIKRPVK

SEQ ID NO: 649 - protein, 30 aa, Synthetic construct
MDSLLMNRRKFLYQFKNVRWAKGRRETYLC

SEQ ID NO: 650 - protein, 665 aa, Synthetic construct
  VARIANT 328..329: note = may be either TR, LR or LK
  VARIANT 356..357: note = may be either TR, LR or LK
  VARIANT 27..28: note = may be either TR, LR or LK
  VARIANT 55..56: note = may be either TR, LR or LK
  VARIANT 630..631: note = may be either TR, LR or LK
  VARIANT 658..659: note = may be either TR, LR or LK
  VARIANT 64..308: note = May be absent
  VARIANT 365..609: note = May be absent
SRPGERPFQCRICMRNFSXXXXXXXHXXTHTGEKPFQCRICMRNFSXXXXXXXHXXTHXXXXXXXXXXXXXXXXXXXXXXXXXXXXXXXXXXXXXXXXXXXXXXXXXXXXXXXXXXXXXXXXXXXXXXXXXXXXXXXXXXXXXXXXXXXXXXXXXXXXXXXXXXXXXXXXXXXXXXXXXXXXXXXXXXXXXXXXXXXXXXXXXXXXXXXXXXXXXXXXXXXXXXXXXXXXXXXXXXXXXXXXXXXXXXXXXXXXXXXXXXXXXXXXXXXXXXXXXXXXXXXXXXXXXXXXXXXXXXXXXXXXXXXXXXFQCRICMRNFSXXXXXXXHXXTHTGEKPFQCRICMRNFSXXXXXXXHXXTHXXXXXXXXXXXXXXXXXXXXXXXXXXXXXXXXXXXXXXXXXXXXXXXXXXXXXXXXXXXXXXXXXXXXXXXXXXXXXXXXXXXXXXXXXXXXXXXXXXXXXXXXXXXXXXXXXXXXXXXXXXXXXXXXXXXXXXXXXXXXXXXXXXXXXXXXXXXXXXXXXXXXXXXXXXXXXXXXXXXXXXXXXXXXXXXXXXXXXXXXXXXXXXXXXXXXXXXXXXXXXXXXXXXXXXXXXXXXXXXXXXXXXXXXXXPFQCRICMRNFSXXXXXXXHXXTHTGEKPFQCRICMRNFSXXXXXXXHXXTHLRGS

SEQ ID NO: 651 - protein, 6 aa, Synthetic construct
TGSQKP

SEQ ID NO: 652 - protein, 9 aa, Synthetic construct
TGGGGSQKP

SEQ ID NO: 653 - RNA, 93 nt, synthetic construct
  source 1..93: mol_type = other RNA
gtttaagagctatgctggaaacagcatagcaagtttaaataaggctagtccgttatcaacttgaaaaagtggcaccgagtcggtgcttttttt

SEQ ID NO: 654 - RNA, 80 nt, Synthetic construct
  source 1..80: mol_type = other RNA
gttttagagctagaaatagcaagttaaaataaggctagtccgttatcaacttgaaaaagtggcaccgagtcggtgctttt

SEQ ID NO: 655 - RNA, 92 nt, Synthetic construct
  source 1..92: mol_type = other RNA
gtttaagagctaagctggaaacagcatagcaagtttaaataaggctagtccgttatcaacttgaaaaagtggcaccgagtcggtgctttttt

SEQ ID NO: 656 - RNA, 93 nt, Synthetic construct
  source 1..93: mol_type = other RNA
gtttaagagctaagctggaaacagcatagcaagtttaaataaggctagtccgttatcaacttgaaaaagtggcaccgagtcggtgcttttttt

SEQ ID NO: 657 - protein, 25 aa, Synthetic construct
  VARIANT 4..5: note = May be absent
  VARIANT 23..24: note = May be absent
CXXXXCXXXXXXXXXXXXHXXXXXH

SEQ ID NO: 658 - protein, 2087 aa, Synthetic construct
MNHDQEFDPPKVYPPVPAEKRKPIRVLSLFDGIATGLLVLKDLGIQVDRYIASEVCEDSITVGMVRHQGKIMYVGDVRSVTQKHIQEWGPFDLVIGGSPCNDLSIVNPARKGLYEGTGRLFFEFYRLLHDARPKEGDDRPFFWLFENVVAMGVSDKRDISRFLESNPVMIDAKEVSAAHRARYFWGNLPGMNRPLASTVNDKLELQECLEHGRIAKFSKVRTITTRSNSIKQGKDQHFPVFMNEKEDILWCTEMERVFGFPVHYTDVSNMSRLARQRLLGRSWSVPVIRHLFAPLKEYFACVSSGNSNANSRGPSFSSGLVPLSLRGSHMGPMEIYKTVSAWKRQPVRVLSLFRNIDKVLKSLGFLESGSGSGGGTLKYVEDVTNVVRRDVEKWGPFDLVYGSTQPLGSSCDRCPGWYMFQFHRILQYALPRQESQRPFFWIFMDNLLLTEDDQETTTRFLQTEAVTLQDVRGRDYQNAMRVWSNIPGLKSKHAPLTPKEEEYLQAQVRSRSKLDAPKVDLLVKNCLLPLREYFKYFSQNSLPLGGPSSGAPPPSGGSPAGSPTSTEEGTSESATPESGPGTSTEPSEGSAPGSPAGSPTSTEEGTSTEPSEGSAPGTSTEPSEPKKKRKVYMDKKYSIGLAIGTNSVGWAVITDEYKVPSKKFKVLGNTDRHSIKKNLIGALLFDSGETAEATRLKRTARRRYTRRKNRICYLQEIFSNEMAKVDDSFFHRLEESFLVEEDKKHERHPIFGNIVDEVAYHEKYPTIYHLRKKLVDSTDKADLRLIYLALAHMIKFRGHFLIEGDLNPDNSDVDKLFIQLVQTYNQLFEENPINASGVDAKAILSARLSKSRRLENLIAQLPGEKKNGLFGNLIALSLGLTPNFKSNFDLAEDAKLQLSKDTYDDDLDNLLAQIGDQYADLFLAAKNLSDAILLSDILRVNTEITKAPLSASMIKRYDEHHQDLTLLKALVRQQLPEKYKEIFFDQSKNGYAGYIDGGASQEEFYKFIKPILEKMDGTEELLVKLNREDLLRKQRTFDNGSIPHQIHLGELHAILRRQEDFYPFLKDNREKIEKILTFRIPYYVGPLARGNSRFAWMTRKSEETITPWNFEEVVDKGASAQSFIERMTNFDKNLPNEKVLPKHSLLYEYFTVYNELTKVKYVTEGMRKPAFLSGEQKKAIVDLLFKTNRKVTVKQLKEDYFKKIECFDSVEISGVEDRFNASLGTYHDLLKIIKDKDFLDNEENEDILEDIVLTLTLFEDREMIEERLKTYAHLFDDKVMKQLKRRRYTGWGRLSRKLINGIRDKQSGKTILDFLKSDGFANRNFMQLIHDDSLTFKEDIQKAQVSGQGDSLHEHIANLAGSPAIKKGILQTVKVVDELVKVMGRHKPENIVIEMARENQTTQKGQKNSRERMKRIEEGIKELGSQILKEHPVENTQLQNEKLYLYYLQNGRDMYVDQELDINRLSDYDVDAIVPQSFLKDDSIDNKVLTRSDKNRGKSDNVPSEEVVKKMKNYWRQLLNAKLITQRKFDNLTKAERGGLSELDKAGFIKRQLVETRQITKHVAQILDSRMNTKYDENDKLIREVKVITLKSKLVSDFRKDFQFYKVREINNYHHAHDAYLNAVVGTALIKKYPKLESEFVYGDYKVYDVRKMIAKSEQEIGKATAKYFFYSNIMNFFKTEITLANGEIRKRPLIETNGETGEIVWDKGRDFATVRKVLSMPQVNIVKKTEVQTGGFSKESILPKRNSDKLIARKKDWDPKKYGGFDSPTVAYSVLVVAKVEKGKSKKLKSVKELLGITIMERSSFEKNPIDFLEAKGYKEVKKDLIIKLPKYSLFELENGRKRMLASAGELQKGNELALPSKYVNFLYLASHYEKLKGSPEDNEQKQLFVEQHKHYLDEIIEQISEFSKRVILADANLDKVLSAYNKHRDKPIREQAENIIHLFTLTNLGAPAAFKYFDTTIDRKRYTSTKEVLDATLIHQSITGLYETRIDLSQLGGDPKKKRKVSGSETPGTSESATPESTGRTLVTFKDVFVDFTREEWKLLDTAQQIVYRNVMLENYKNLVSLGYQLTKPDVILRLEKGEEP

SEQ ID NO: 659 - protein, 1385 aa, Synthetic construct
  VARIANT 659..660: note = may be either TR, LR or LK
  VARIANT 961..962: note = may be either TR, LR or LK
  VARIANT 989..990: note = may be either TR, LR or LK
  VARIANT 687..688: note = may be either TR, LR or LK
  VARIANT 1291..1292: note = may be either TR, LR or LK
  VARIANT 1263..1264: note = may be either TR, LR or LK
  VARIANT 998..1242: note = May be absent
  VARIANT 696..940: note = May be absent
MNHDQEFDPPKVYPPVPAEKRKPIRVLSLFDGIATGLLVLKDLGIQVDRYIASEVCEDSITVGMVRHQGKIMYVGDVRSVTQKHIQEWGPFDLVIGGSPCNDLSIVNPARKGLYEGTGRLFFEFYRLLHDARPKEGDDRPFFWLFENVVAMGVSDKRDISRFLESNPVMIDAKEVSAAHRARYFWGNLPGMNRPLASTVNDKLELQECLEHGRIAKFSKVRTITTRSNSIKQGKDQHFPVFMNEKEDILWCTEMERVFGFPVHYTDVSNMSRLARQRLLGRSWSVPVIRHLFAPLKEYFACVSSGNSNANSRGPSFSSGLVPLSLRGSHMGPMEIYKTVSAWKRQPVRVLSLFRNIDKVLKSLGFLESGSGSGGGTLKYVEDVTNVVRRDVEKWGPFDLVYGSTQPLGSSCDRCPGWYMFQFHRILQYALPRQESQRPFFWIFMDNLLLTEDDQETTTRFLQTEAVTLQDVRGRDYQNAMRVWSNIPGLKSKHAPLTPKEEEYLQAQVRSRSKLDAPKVDLLVKNCLLPLREYFKYFSQNSLPLGGPSSGAPPPSGGSPAGSPTSTEEGTSESATPESGPGTSTEPSEGSAPGSPAGSPTSTEEGTSTEPSEGSAPGTSTEPSEPKKKRKVYSRPGERPFQCRICMRNFSXXXXXXXHXXTHTGEKPFQCRICMRNFSXXXXXXXHXXTHXXXXXXXXXXXXXXXXXXXXXXXXXXXXXXXXXXXXXXXXXXXXXXXXXXXXXXXXXXXXXXXXXXXXXXXXXXXXXXXXXXXXXXXXXXXXXXXXXXXXXXXXXXXXXXXXXXXXXXXXXXXXXXXXXXXXXXXXXXXXXXXXXXXXXXXXXXXXXXXXXXXXXXXXXXXXXXXXXXXXXXXXXXXXXXXXXXXXXXXXXXXXXXXXXXXXXXXXXXXXXXXXXXXXXXXXXXXXXXXXXXXXXXXXXXPFQCRICMRNFSXXXXXXXHXXTHTGEKPFQCRICMRNFSXXXXXXXHXXTHXXXXXXXXXXXXXXXXXXXXXXXXXXXXXXXXXXXXXXXXXXXXXXXXXXXXXXXXXXXXXXXXXXXXXXXXXXXXXXXXXXXXXXXXXXXXXXXXXXXXXXXXXXXXXXXXXXXXXXXXXXXXXXXXXXXXXXXXXXXXXXXXXXXXXXXXXXXXXXXXXXXXXXXXXXXXXXXXXXXXXXXXXXXXXXXXXXXXXXXXXXXXXXXXXXXXXXXXXXXXXXXXXXXXXXXXXXXXXXXXXXXXXXXXXXPFQCRICMRNFSXXXXXXXHXXTHTGEKPFQCRICMRNFSXXXXXXXHXXTHLRGSPKKKRKVSGSETPGTSESATPESTGRTLVTFKDVFVDFTREEWKLLDTAQQIVYRNVMLENYKNLVSLGYQLTKPDVILRLEKGEEP

SEQ ID NO: 660 - protein, 2298 aa, Synthetic construct
MGTMPKKKRKVPKKKRKVYNHDQEFDPPKVYPPVPAEKRKPIRVLSLFDGIATGLLVLKDLGIQVDRYIASEVCEDSITVGMVRHQGKIMYVGDVRSVTQKHIQEWGPFDLVIGGSPCNDLSIVNPARKGLYEGTGRLFFEFYRLLHDARPKEGDDRPFFWLFENVVAMGVSDKRDISRFLESNPVMIDAKEVSAAHRARYFWGNLPGMNRPLASTVNDKLELQECLEHGRIAKFSKVRTITTRSNSIKQGKDQHFPVFMNEKEDILWCTEMERVFGFPVHYTDVSNMSRLARQRLLGRSWSVPVIRHLFAPLKEYFACVSSGNSNANSRGPSFSSGLVPLSLRGSHMAAIPALDPEAEPSMDVILVGSSELSSSVSPGTGRDLIAYEVKANQRNIEDICICCGSLQVHTQHPLFEGGICAPCKDKFLDALFLYDDDGYQSYCSICCSGETLLICGNPDCTRCYCFECVDSLVGPGTSGKVHAMSNWVCYLCLPSSRSGLLQRRRKWRSQLKAFYDRESENPLEMFETVPVWRRQPVRVLSLFEDIKKELTSLGFLESGSDPGQLKHVVDVTDTVRKDVEEWGPFDLVYGATPPLGHTCDRPPSWYLFQFHRLLQYARPKPGSPRPFFWMFVDNLVLNKEDLDVASRFLEMEPVTIPDVHGGSLQNAVRVWSNIPAIRSRHWALVSEEELSLLAQNKQSSKLAAKWPTKLVKNCFLPLREYFKYFSTELTSSLGGPSSGAPPPSGGSPAGSPTSTEEGTSESATPESGPGTSTEPSEGSAPGSPAGSPTSTEEGTSTEPSEGSAPGTSTEPSELEDKKYSIGLAIGTNSVGWAVITDEYKVPSKKFKVLGNTDRHSIKKNLIGALLFDSGETAEATRLKRTARRRYTRRKNRICYLQEIFSNEMAKVDDSFFHRLEESFLVEEDKKHERHPIFGNIVDEVAYHEKYPTIYHLRKKLVDSTDKADLRLIYLALAHMIKFRGHFLIEGDLNPDNSDVDKLFIQLVQTYNQLFEENPINASGVDAKAILSARLSKSRRLENLIAQLPGEKKNGLFGNLIALSLGLTPNFKSNFDLAEDAKLQLSKDTYDDDLDNLLAQIGDQYADLFLAAKNLSDAILLSDILRVNTEITKAPLSASMIKRYDEHHQDLTLLKALVRQQLPEKYKEIFFDQSKNGYAGYIDGGASQEEFYKFIKPILEKMDGTEELLVKLNREDLLRKQRTFDNGSIPHQIHLGELHAILRRQEDFYPFLKDNREKIEKILTFRIPYYVGPLARGNSRFAWMTRKSEETITPWNFEEVVDKGASAQSFIERMTNFDKNLPNEKVLPKHSLLYEYFTVYNELTKVKYVTEGMRKPAFLSGEQKKAIVDLLFKTNRKVTVKQLKEDYFKKIECFDSVEISGVEDRFNASLGTYHDLLKIIKDKDFLDNEENEDILEDIVLTLTLFEDREMIEERLKTYAHLFDDKVMKQLKRRRYTGWGRLSRKLINGIRDKQSGKTILDFLKSDGFANRNFMQLIHDDSLTFKEDIQKAQVSGQGDSLHEHIANLAGSPAIKKGILQTVKVVDELVKVMGRHKPENIVIEMARENQTTQKGQKNSRERMKRIEEGIKELGSQILKEHPVENTQLQNEKLYLYYLQNGRDMYVDQELDINRLSDYDVDAIVPQSFLKDDSIDNKVLTRSDKNRGKSDNVPSEEVVKKMKNYWRQLLNAKLITQRKFDNLTKAERGGLSELDKAGFIKRQLVETRQITKHVAQILDSRMNTKYDENDKLIREVKVITLKSKLVSDFRKDFQFYKVREINNYHHAHDAYLNAVVGTALIKKYPKLESEFVYGDYKVYDVRKMIAKSEQEIGKATAKYFFYSNIMNFFKTEITLANGEIRKRPLIETNGETGEIVWDKGRDFATVRKVLSMPQVNIVKKTEVQTGGFSKESILPKRNSDKLIARKKDWDPKKYGGFDSPTVAYSVLVVAKVEKGKSKKLKSVKELLGITIMERSSFEKNPIDFLEAKGYKEVKKDLIIKLPKYSLFELENGRKRMLASAGELQKGNELALPSKYVNFLYLASHYEKLKGSPEDNEQKQLFVEQHKHYLDEIIEQISEFSKRVILADANLDKVLSAYNKHRDKPIREQAENIIHLFTLTNLGAPAAFKYFDTTIDRKRYTSTKEVLDATLIHQSITGLYETRIDLSQLGGDSPKKKRKVGVDGSSGSETPGTSESATPESRTLVTFKDVFVDFTREEWKLLDTAQQIVYRNVMLENYKNLVSLGYQLTKPDVILRLEKGEEPSADYKDDDDKAPKKKRKVPKKKRKV

SEQ ID NO: 661 - protein, 2318 aa, Synthetic construct
MGTMPKKKRKVPKKKRKVYNHDQEFDPPKVYPPVPAEKRKPIRVLSLFDGIATGLLVLKDLGIQVDRYIASEVCEDSITVGMVRHQGKIMYVGDVRSVTQKHIQEWGPFDLVIGGSPCNDLSIVNPARKGLYEGTGRLFFEFYRLLHDARPKEGDDRPFFWLFENVVAMGVSDKRDISRFLESNPVMIDAKEVSAAHRARYFWGNLPGMNRPLASTVNDKLELQECLEHGRIAKFSKVRTITTRSNSIKQGKDQHFPVFMNEKEDILWCTEMERVFGFPVHYTDVSNMSRLARQRLLGRSWSVPVIRHLFAPLKEYFACVSSGNSNANSRGPSFSSGLVPLSLRGSHMAAIPALDPEAEPSMDVILVGSSELSSSVSPGTGRDLIAYEVKANQRNIEDICICCGSLQVHTQHPLFEGGICAPCKDKFLDALFLYDDDGYQSYCSICCSGETLLICGNPDCTRCYCFECVDSLVGPGTSGKVHAMSNWVCYLCLPSSRSGLLQRRRKWRSQLKAFYDRESENPLEMFETVPVWRRQPVRVLSLFEDIKKELTSLGFLESGSDPGQLKHVVDVTDTVRKDVEEWGPFDLVYGATPPLGHTCDRPPSWYLFQFHRLLQYARPKPGSPRPFFWMFVDNLVLNKEDLDVASRFLEMEPVTIPDVHGGSLQNAVRVWSNIPAIRSRHWALVSEEELSLLAQNKQSSKLAAKWPTKLVKNCFLPLREYFKYFSTELTSSLGGPSSGAPPPSGGSPAGSPTSTEEGTSESATPESGPGTSTEPSEGSAPGSPAGSPTSTEEGTSTEPSEGSAPGTSTEPSELEDKKYSIGLAIGTNSVGWAVITDEYKVPSKKFKVLGNTDRHSIKKNLIGALLFDSGETAEATRLKRTARRRYTRRKNRICYLQEIFSNEMAKVDDSFFHRLEESFLVEEDKKHERHPIFGNIVDEVAYHEKYPTIYHLRKKLVDSTDKADLRLIYLALAHMIKFRGHFLIEGDLNPDNSDVDKLFIQLVQTYNQLFEENPINASGVDAKAILSARLSKSRRLENLIAQLPGEKKNGLFGNLIALSLGLTPNFKSNFDLAEDAKLQLSKDTYDDDLDNLLAQIGDQYADLFLAAKNLSDAILLSDILRVNTEITKAPLSASMIKRYDEHHQDLTLLKALVRQQLPEKYKEIFFDQSKNGYAGYIDGGASQEEFYKFIKPILEKMDGTEELLVKLNREDLLRKQRTFDNGSIPHQIHLGELHAILRRQEDFYPFLKDNREKIEKILTFRIPYYVGPLARGNSRFAWMTRKSEETITPWNFEEVVDKGASAQSFIERMTNFDKNLPNEKVLPKHSLLYEYFTVYNELTKVKYVTEGMRKPAFLSGEQKKAIVDLLFKTNRKVTVKQLKEDYFKKIECFDSVEISGVEDRFNASLGTYHDLLKIIKDKDFLDNEENEDILEDIVLTLTLFEDREMIEERLKTYAHLFDDKVMKQLKRRRYTGWGRLSRKLINGIRDKQSGKTILDFLKSDGFANRNFMQLIHDDSLTFKEDIQKAQVSGQGDSLHEHIANLAGSPAIKKGILQTVKVVDELVKVMGRHKPENIVIEMARENQTTQKGQKNSRERMKRIEEGIKELGSQILKEHPVENTQLQNEKLYLYYLQNGRDMYVDQELDINRLSDYDVDAIVPQSFLKDDSIDNKVLTRSDKNRGKSDNVPSEEVVKKMKNYWRQLLNAKLITQRKFDNLTKAERGGLSELDKAGFIKRQLVETRQITKHVAQILDSRMNTKYDENDKLIREVKVITLKSKLVSDFRKDFQFYKVREINNYHHAHDAYLNAVVGTALIKKYPKLESEFVYGDYKVYDVRKMIAKSEQEIGKATAKYFFYSNIMNFFKTEITLANGEIRKRPLIETNGETGEIVWDKGRDFATVRKVLSMPQVNIVKKTEVQTGGFSKESILPKRNSDKLIARKKDWDPKKYGGFDSPTVAYSVLVVAKVEKGKSKKLKSVKELLGITIMERSSFEKNPIDFLEAKGYKEVKKDLIIKLPKYSLFELENGRKRMLASAGELQKGNELALPSKYVNFLYLASHYEKLKGSPEDNEQKQLFVEQHKHYLDEIIEQISEFSKRVILADANLDKVLSAYNKHRDKPIREQAENIIHLFTLTNLGAPAAFKYFDTTIDRKRYTSTKEVLDATLIHQSITGLYETRIDLSQLGGDSPKKKRKVGVDGSSGSETPGTSESATPESTGNKKLEAVGTGIEPKAMSQGLVTFGDVAVDFSQEEWEWLNPIQRNLYRKVMLENYRNLASLGLCVSKPDVISSLEQGKEPWSADYKDDDDKAPKKKRKVPKKKRKV

SEQ ID NO: 662 - protein, 2318 aa, Synthetic construct
MGTMPKKKRKVPKKKRKVYNHDQEFDPPKVYPPVPAEKRKPIRVLSLFDGIATGLLVLKDLGIQVDRYIASEVCEDSITVGMVRHQGKIMYVGDVRSVTQKHIQEWGPFDLVIGGSPCNDLSIVNPARKGLYEGTGRLFFEFYRLLHDARPKEGDDRPFFWLFENVVAMGVSDKRDISRFLESNPVMIDAKEVSAAHRARYFWGNLPGMNRPLASTVNDKLELQECLEHGRIAKFSKVRTITTRSNSIKQGKDQHFPVFMNEKEDILWCTEMERVFGFPVHYTDVSNMSRLARQRLLGRSWSVPVIRHLFAPLKEYFACVSSGNSNANSRGPSFSSGLVPLSLRGSHMAAIPALDPEAEPSMDVILVGSSELSSSVSPGTGRDLIAYEVKANQRNIEDICICCGSLQVHTQHPLFEGGICAPCKDKFLDALFLYDDDGYQSYCSICCSGETLLICGNPDCTRCYCFECVDSLVGPGTSGKVHAMSNWVCYLCLPSSRSGLLQRRRKWRSQLKAFYDRESENPLEMFETVPVWRRQPVRVLSLFEDIKKELTSLGFLESGSDPGQLKHVVDVTDTVRKDVEEWGPFDLVYGATPPLGHTCDRPPSWYLFQFHRLLQYARPKPGSPRPFFWMFVDNLVLNKEDLDVASRFLEMEPVTIPDVHGGSLQNAVRVWSNIPAIRSRHWALVSEEELSLLAQNKQSSKLAAKWPTKLVKNCFLPLREYFKYFSTELTSSLGGPSSGAPPPSGGSPAGSPTSTEEGTSESATPESGPGTSTEPSEGSAPGSPAGSPTSTEEGTSTEPSEGSAPGTSTEPSELEDKKYSIGLAIGTNSVGWAVITDEYKVPSKKFKVLGNTDRHSIKKNLIGALLFDSGETAEATRLKRTARRRYTRRKNRICYLQEIFSNEMAKVDDSFFHRLEESFLVEEDKKHERHPIFGNIVDEVAYHEKYPTIYHLRKKLVDSTDKADLRLIYLALAHMIKFRGHFLIEGDLNPDNSDVDKLFIQLVQTYNQLFEENPINASGVDAKAILSARLSKSRRLENLIAQLPGEKKNGLFGNLIALSLGLTPNFKSNFDLAEDAKLQLSKDTYDDDLDNLLAQIGDQYADLFLAAKNLSDAILLSDILRVNTEITKAPLSASMIKRYDEHHQDLTLLKALVRQQLPEKYKEIFFDQSKNGYAGYIDGGASQEEFYKFIKPILEKMDGTEELLVKLNREDLLRKQRTFDNGSIPHQIHLGELHAILRRQEDFYPFLKDNREKIEKILTFRIPYYVGPLARGNSRFAWMTRKSEETITPWNFEEVVDKGASAQSFIERMTNFDKNLPNEKVLPKHSLLYEYFTVYNELTKVKYVTEGMRKPAFLSGEQKKAIVDLLFKTNRKVTVKQLKEDYFKKIECFDSVEISGVEDRFNASLGTYHDLLKIIKDKDFLDNEENEDILEDIVLTLTLFEDREMIEERLKTYAHLFDDKVMKQLKRRRYTGWGRLSRKLINGIRDKQSGKTILDFLKSDGFANRNFMQLIHDDSLTFKEDIQKAQVSGQGDSLHEHIANLAGSPAIKKGILQTVKVVDELVKVMGRHKPENIVIEMARENQTTQKGQKNSRERMKRIEEGIKELGSQILKEHPVENTQLQNEKLYLYYLQNGRDMYVDQELDINRLSDYDVDAIVPQSFLKDDSIDNKVLTRSDKNRGKSDNVPSEEVVKKMKNYWRQLLNAKLITQRKFDNLTKAERGGLSELDKAGFIKRQLVETRQITKHVAQILDSRMNTKYDENDKLIREVKVITLKSKLVSDFRKDFQFYKVREINNYHHAHDAYLNAVVGTALIKKYPKLESEFVYGDYKVYDVRKMIAKSEQEIGKATAKYFFYSNIMNFFKTEITLANGEIRKRPLIETNGETGEIVWDKGRDFATVRKVLSMPQVNIVKKTEVQTGGFSKESILPKRNSDKLIARKKDWDPKKYGGFDSPTVAYSVLVVAKVEKGKSKKLKSVKELLGITIMERSSFEKNPIDFLEAKGYKEVKKDLIIKLPKYSLFELENGRKRMLASAGELQKGNELALPSKYVNFLYLASHYEKLKGSPEDNEQKQLFVEQHKHYLDEIIEQISEFSKRVILADANLDKVLSAYNKHRDKPIREQAENIIHLFTLTNLGAPAAFKYFDTTIDRKRYTSTKEVLDATLIHQSITGLYETRIDLSQLGGDSPKKKRKVGVDGSSGSETPGTSESATPESTGDSVAFEDVAVNFTLEEWALLDPSQKNLYRDVMRETFRNLASVGKQWEDQNIEDPFKIPRRNISHIPERLCESKEGGQGEESADYKDDDDKAPKKKRKVPKKKRKV

SEQ ID NO: 663 - protein, 2338 aa, Synthetic construct
MGTMPKKKRKVPKKKRKVYNHDQEFDPPKVYPPVPAEKRKPIRVLSLFDGIATGLLVLKDLGIQVDRYIASEVCEDSITVGMVRHQGKIMYVGDVRSVTQKHIQEWGPFDLVIGGSPCNDLSIVNPARKGLYEGTGRLFFEFYRLLHDARPKEGDDRPFFWLFENVVAMGVSDKRDISRFLESNPVMIDAKEVSAAHRARYFWGNLPGMNRPLASTVNDKLELQECLEHGRIAKFSKVRTITTRSNSIKQGKDQHFPVFMNEKEDILWCTEMERVFGFPVHYTDVSNMSRLARQRLLGRSWSVPVIRHLFAPLKEYFACVSSGNSNANSRGPSFSSGLVPLSLRGSHMAAIPALDPEAEPSMDVILVGSSELSSSVSPGTGRDLIAYEVKANQRNIEDICICCGSLQVHTQHPLFEGGICAPCKDKFLDALFLYDDDGYQSYCSICCSGETLLICGNPDCTRCYCFECVDSLVGPGTSGKVHAMSNWVCYLCLPSSRSGLLQRRRKWRSQLKAFYDRESENPLEMFETVPVWRRQPVRVLSLFEDIKKELTSLGFLESGSDPGQLKHVVDVTDTVRKDVEEWGPFDLVYGATPPLGHTCDRPPSWYLFQFHRLLQYARPKPGSPRPFFWMFVDNLVLNKEDLDVASRFLEMEPVTIPDVHGGSLQNAVRVWSNIPAIRSRHWALVSEEELSLLAQNKQSSKLAAKWPTKLVKNCFLPLREYFKYFSTELTSSLGGPSSGAPPPSGGSPAGSPTSTEEGTSESATPESGPGTSTEPSEGSAPGSPAGSPTSTEEGTSTEPSEGSAPGTSTEPSELEDKKYSIGLAIGTNSVGWAVITDEYKVPSKKFKVLGNTDRHSIKKNLIGALLFDSGETAEATRLKRTARRRYTRRKNRICYLQEIFSNEMAKVDDSFFHRLEESFLVEEDKKHERHPIFGNIVDEVAYHEKYPTIYHLRKKLVDSTDKADLRLIYLALAHMIKFRGHFLIEGDLNPDNSDVDKLFIQLVQTYNQLFEENPINASGVDAKAILSARLSKSRRLENLIAQLPGEKKNGLFGNLIALSLGLTPNFKSNFDLAEDAKLQLSKDTYDDDLDNLLAQIGDQYADLFLAAKNLSDAILLSDILRVNTEITKAPLSASMIKRYDEHHQDLTLLKALVRQQLPEKYKEIFFDQSKNGYAGYIDGGASQEEFYKFIKPILEKMDGTEELLVKLNREDLLRKQRTFDNGSIPHQIHLGELHAILRRQEDFYPFLKDNREKIEKILTFRIPYYVGPLARGNSRFAWMTRKSEETITPWNFEEVVDKGASAQSFIERMTNFDKNLPNEKVLPKHSLLYEYFTVYNELTKVKYVTEGMRKPAFLSGEQKKAIVDLLFKTNRKVTVKQLKEDYFKKIECFDSVEISGVEDRFNASLGTYHDLLKIIKDKDFLDNEENEDILEDIVLTLTLFEDREMIEERLKTYAHLFDDKVMKQLKRRRYTGWGRLSRKLINGIRDKQSGKTILDFLKSDGFANRNFMQLIHDDSLTFKEDIQKAQVSGQGDSLHEHIANLAGSPAIKKGILQTVKVVDELVKVMGRHKPENIVIEMARENQTTQKGQKNSRERMKRIEEGIKELGSQILKEHPVENTQLQNEKLYLYYLQNGRDMYVDQELDINRLSDYDVDAIVPQSFLKDDSIDNKVLTRSDKNRGKSDNVPSEEVVKKMKNYWRQLLNAKLITQRKFDNLTKAERGGLSELDKAGFIKRQLVETRQITKHVAQILDSRMNTKYDENDKLIREVKVITLKSKLVSDFRKDFQFYKVREINNYHHAHDAYLNAVVGTALIKKYPKLESEFVYGDYKVYDVRKMIAKSEQEIGKATAKYFFYSNIMNFFKTEITLANGEIRKRPLIETNGETGEIVWDKGRDFATVRKVLSMPQVNIVKKTEVQTGGFSKESILPKRNSDKLIARKKDWDPKKYGGFDSPTVAYSVLVVAKVEKGKSKKLKSVKELLGITIMERSSFEKNPIDFLEAKGYKEVKKDLIIKLPKYSLFELENGRKRMLASAGELQKGNELALPSKYVNFLYLASHYEKLKGSPEDNEQKQLFVEQHKHYLDEIIEQISEFSKRVILADANLDKVLSAYNKHRDKPIREQAENIIHLFTLTNLGAPAAFKYFDTTIDRKRYTSTKEVLDATLIHQSITGLYETRIDLSQLGGDSPKKKRKVGVDGSSGSETPGTSESATPESTGMNNSQGRVTFEDVTVNFTQGEWQRLNPEQRNLYRDVMLENYSNLVSVGQGETTKPDVILRLEQGKEPWLEEEEVLGSGRAEKNGDIGGQIWKPKDVKESLSADYKDDDDKAPKKKRKVPKKKRKV

SEQ ID NO: 664 - protein, 150 aa, Synthetic construct
GGGGSGGGGSGGGGSGGGGSGGGGSGGGGSGGGGSGGGGSGGGGSGGGGSGGGGSGGGGSGGGGSGGGGSGGGGSGGGGSGGGGSGGGGSGGGGSGGGGSGGGGSGGGGSGGGGSGGGGSGGGGSGGGGSGGGGSGGGGSGGGGSGGGGS

SEQ ID NO: 665 - protein, 150 aa, Synthetic construct
EAAAKEAAAKEAAAKEAAAKEAAAKEAAAKEAAAKEAAAKEAAAKEAAAKEAAAKEAAAKEAAAKEAAAKEAAAKEAAAKEAAAKEAAAKEAAAKEAAAKEAAAKEAAAKEAAAKEAAAKEAAAKEAAAKEAAAKEAAAKEAAAKEAAAK

SEQ ID NO: 666 - protein, 120 aa, Synthetic construct
SGGSSGGSSGGSSGGSSGGSSGGSSGGSSGGSSGGSSGGSSGGSSGGSSGGSSGGSSGGSSGGSSGGSSGGSSGGSSGGSSGGSSGGSSGGSSGGSSGGSSGGSSGGSSGGSSGGSSGGS

SEQ ID NO: 667 - DNA, 103 bp, Synthetic construct
  source 1..103: mol_type = other DNA
tcaactgcgaccagttcagcgtttaagagctagaaatagcaagtttaaataaggctagtccgttatcaacttgaaaaagtggcaccgagtcggtgcttttttt

SEQ ID NO: 668 - protein, 2098 aa, Synthetic construct
MPKKKRKVPKKKRKVNHDQEFDPPKVYPPVPAEKRKPIRVLSLFDGIATGLLVLKDLGIQVDRYIASEVCEDSITVGMVRHQGKIMYVGDVRSVTQKHIQEWGPFDLVIGGSPCNDLSIVNPARKGLYEGTGRLFFEFYRLLHDARPKEGDDRPFFWLFENVVAMGVSDKRDISRFLESNPVMIDAKEVSAAHRARYFWGNLPGMNRPLASTVNDKLELQECLEHGRIAKFSKVRTITTRSNSIKQGKDQHFPVFMNEKEDILWCTEMERVFGFPVHYTDVSNMSRLARQRLLGRSWSVPVIRHLFAPLKEYFACVSSGNSNANSRGPSFSSGLVPLSLRGSHNPLEMFETVPVWRRQPVRVLSLFEDIKKELTSLGFLESGSDPGQLKHVVDVTDTVRKDVEEWGPFDLVYGATPPLGHTCDRPPSWYLFQFHRLLQYARPKPGSPRPFFWMFVDNLVLNKEDLDVASRFLEMEPVTIPDVHGGSLQNAVRVWSNIPAIRSRHWALVSEEELSLLAQNKQSSKLAAKWPTKLVKNCFLPLREYFKYFSTELTSSLGGPSSGAPPPSGGSPAGSPTSTEEGTSESATPESGPGTSTEPSEGSAPGSPAGSPTSTEEGTSTEPSEGSAPGTSTEPSEMDKKYSIGLAIGTNSVGWAVITDEYKVPSKKFKVLGNTDRHSIKKNLIGALLFDSGETAEATRLKRTARRRYTRRKNRICYLQEIFSNEMAKVDDSFFHRLEESFLVEEDKKHERHPIFGNIVDEVAYHEKYPTIYHLRKKLVDSTDKADLRLIYLALAHMIKFRGHFLIEGDLNPDNSDVDKLFIQLVQTYNQLFEENPINASGVDAKAILSARLSKSRRLENLIAQLPGEKKNGLFGNLIALSLGLTPNFKSNFDLAEDAKLQLSKDTYDDDLDNLLAQIGDQYADLFLAAKNLSDAILLSDILRVNTEITKAPLSASMIKRYDEHHQDLTLLKALVRQQLPEKYKEIFFDQSKNGYAGYIDGGASQEEFYKFIKPILEKMDGTEELLVKLNREDLLRKQRTFDNGSIPHQIHLGELHAILRRQEDFYPFLKDNREKIEKILTFRIPYYVGPLARGNSRFAWMTRKSEETITPWNFEEVVDKGASAQSFIERMTNFDKNLPNEKVLPKHSLLYEYFTVYNELTKVKYVTEGMRKPAFLSGEQKKAIVDLLFKTNRKVTVKQLKEDYFKKIECFDSVEISGVEDRFNASLGTYHDLLKIIKDKDFLDNEENEDILEDIVLTLTLFEDREMIEERLKTYAHLFDDKVMKQLKRRRYTGWGRLSRKLINGIRDKQSGKTILDFLKSDGFANRNFMQLIHDDSLTFKEDIQKAQVSGQGDSLHEHIANLAGSPAIKKGILQTVKVVDELVKVMGRHKPENIVIEMARENQTTQKGQKNSRERMKRIEEGIKELGSQILKEHPVENTQLQNEKLYLYYLQNGRDMYVDQELDINRLSDYDVDAIVPQSFLKDDSIDNKVLTRSDKNRGKSDNVPSEEVVKKMKNYWRQLLNAKLITQRKFDNLTKAERGGLSELDKAGFIKRQLVETRQITKHVAQILDSRMNTKYDENDKLIREVKVITLKSKLVSDFRKDFQFYKVREINNYHHAHDAYLNAVVGTALIKKYPKLESEFVYGDYKVYDVRKMIAKSEQEIGKATAKYFFYSNIMNFFKTEITLANGEIRKRPLIETNGETGEIVWDKGRDFATVRKVLSMPQVNIVKKTEVQTGGFSKESILPKRNSDKLIARKKDWDPKKYGGFDSPTVAYSVLVVAKVEKGKSKKLKSVKELLGITIMERSSFEKNPIDFLEAKGYKEVKKDLIIKLPKYSLFELENGRKRMLASAGELQKGNELALPSKYVNFLYLASHYEKLKGSPEDNEQKQLFVEQHKHYLDEIIEQISEFSKRVILADANLDKVLSAYNKHRDKPIREQAENIIHLFTLTNLGAPAAFKYFDTTIDRKRYTSTKEVLDATLIHQSITGLYETRIDLSQLGGDSGSETPGTSESATPESTGRTLVTFKDVFVDFTREEWKLLDTAQQIVYRNVMLENYKNLVSLGYQLTKPDVILRLEKGEEPPKKKRKVPKKKRKV

SEQ ID NO: 669 - DNA, 103 bp, Synthetic construct; identical to SEQ ID NO: 667
  source 1..103: mol_type = other DNA

SEQ ID NO: 670 - DNA, 20 bp, Synthetic construct
  source 1..20: mol_type = other DNA
ccgcttggggccaccttgca

SEQ ID NO: 671 - DNA, 20 bp, Synthetic construct
  source 1..20: mol_type = other DNA
accgcttggggccaccttgc

SEQ ID NO: 672 - DNA, 20 bp, Synthetic construct
  source 1..20: mol_type = other DNA
ggcatccgaaggcatccttg

SEQ ID NO: 673 - DNA, 20 bp, Synthetic construct
  source 1..20: mol_type = other DNA
tagtgatgaggctagtgatg

SEQ ID NO: 674 - DNA, 20 bp, Synthetic construct
  source 1..20: mol_type = other DNA
agtctcctctgtaaccccta

SEQ ID NO: 675 - DNA, 20 bp, Synthetic construct
  source 1..20: mol_type = other DNA
ccctgcaaggtggccccaag

SEQ ID NO: 676 - DNA, 20 bp, Synthetic construct
  source 1..20: mol_type = other DNA
aggaggggctgccagactcc

SEQ ID NO: 677 - DNA, 20 bp, Synthetic construct
  source 1..20: mol_type = other DNA
tctgaacgtcagactgttga

SEQ ID NO: 678 - DNA, 20 bp, Synthetic construct
  source 1..20: mol_type = other DNA
gacctgaagtctccctccgg

SEQ ID NO: 679 - DNA, 20 bp, Synthetic construct
  source 1..20: mol_type = other DNA
ttgcacagaaagtctgttgg

SEQ ID NO: 680 - DNA, 20 bp, Synthetic construct
  source 1..20: mol_type = other DNA
accaaattcagtccacagta

SEQ ID NO: 681 - DNA, 20 bp, Synthetic construct
  source 1..20: mol_type = other DNA
tgcatgttggcttagcttgg

SEQ ID NO: 682 - DNA, 20 bp, Synthetic construct
  source 1..20: mol_type = other DNA
tccttactgtggactgaatt

SEQ ID NO: 683 - DNA, 20 bp, Synthetic construct
  source 1..20: mol_type = other DNA
ctggtgactggttagtgatg

SEQ ID NO: 684 - DNA, 20 bp, Synthetic construct
  source 1..20: mol_type = other DNA
ggcatccttggggaagctga

SEQ ID NO: 685 - DNA, 20 bp, Synthetic construct
  source 1..20: mol_type = other DNA
aggtaggacccagcagggcg

SEQ ID NO: 686 - DNA, 20 bp, Synthetic construct
  source 1..20: mol_type = other DNA
agggagtgtggtaaaattag

SEQ ID NO: 687 - DNA, 20 bp, Synthetic construct
  source 1..20: mol_type = other DNA
gctgacctgaagtctccctc

SEQ ID NO: 688 - DNA, 20 bp, Synthetic construct
  source 1..20: mol_type = other DNA
gttgcacagaaagtctgttg

SEQ ID NO: 689 - DNA, 20 bp, Synthetic construct
  source 1..20: mol_type = other DNA
ggggagggcttaagggagtg

SEQ ID NO: 690 - DNA, 20 bp, Synthetic construct
  source 1..20: mol_type = other DNA
gggagtgtggtaaaattaga

SEQ ID NO: 691 - DNA, 20 bp, Synthetic construct
  source 1..20: mol_type = other DNA
gggcatccgaaggcatcctt

SEQ ID NO: 692 - DNA, 20 bp, Synthetic construct
  source 1..20: mol_type = other DNA
ctttgcatgttggcttagct

SEQ ID NO: 693 - DNA, 20 bp, Synthetic construct
  source 1..20: mol_type = other DNA
aacatgcaaagaaacaagtg

SEQ ID NO: 694 - DNA, 20 bp, Synthetic construct
  source 1..20: mol_type = other DNA
gaggtgtggggagggcttaa

SEQ ID NO: 695 - DNA, 20 bp, Synthetic construct
  source 1..20: mol_type = other DNA
atctaagaagtccccagcag

SEQ ID NO: 696 - DNA, 20 bp, Synthetic construct
  source 1..20: mol_type = other DNA
attggcagctggcaccagtg

SEQ ID NO: 697 - DNA, 20 bp, Synthetic construct
  source 1..20: mol_type = other DNA
ttcagaaatgatgatcacaa

SEQ ID NO: 698 - DNA, 20 bp, Synthetic construct
  source 1..20: mol_type = other DNA
aggggttacagaggagactt

SEQ ID NO: 699 - DNA, 20 bp, Synthetic construct
  source 1..20: mol_type = other DNA
ggaagtgaaattaatttcag

SEQ ID NO: 700 - DNA, 18 bp, Synthetic construct
  source 1..18: mol_type = other DNA
gaaaatgacaggtgggcc

SEQ ID NO: 701 - DNA, 18 bp, Synthetic construct
  source 1..18: mol_type = other DNA
ttggtgtgggagtaggca

SEQ ID NO: 702 - DNA, 18 bp, Synthetic construct
  source 1..18: mol_type = other DNA
gggtgttcagaaacagaa

SEQ ID NO: 703 - DNA, 18 bp, Synthetic construct
  source 1..18: mol_type = other DNA
ggggaagctgagggcacg

SEQ ID NO: 704 - DNA, 18 bp, Synthetic construct
  source 1..18: mol_type = other DNA
ggtcaggggacgggggaa

SEQ ID NO: 705 - DNA, 18 bp, Synthetic construct
  source 1..18: mol_type = other DNA
ggctgggaagggtgtgcc

SEQ ID NO: 706 - DNA, 18 bp, Synthetic construct
  source 1..18: mol_type = other DNA
gccggtgtggttgggtgc

SEQ ID NO: 707 - DNA, 18 bp, Synthetic construct
  source 1..18: mol_type = other DNA
taagttgctacgggaaag

SEQ ID NO: 708 - DNA, 18 bp, Synthetic construct
  source 1..18: mol_type = other DNA
gttggagggggagaagtc

SEQ ID NO: 709 - DNA, 18 bp, Synthetic construct
  source 1..18: mol_type = other DNA
gaggacccagcaggaatc

SEQ ID NO: 710 - DNA, 18 bp, Synthetic construct
  source 1..18: mol_type = other DNA
gacaggtaggacccagca

SEQ ID NO: 711 - DNA, 18 bp, Synthetic construct
  source 1..18: mol_type = other DNA
ctggaatggcaggaccag

SEQ ID NO: 712 - DNA, 18 bp, Synthetic construct
  source 1..18: mol_type = other DNA
ggagtggagtctggcaga

SEQ ID NO: 713 - DNA, 18 bp, Synthetic construct
  source 1..18: mol_type = other DNA
gccaacggtgtagctgcc

SEQ ID NO: 714 - DNA, 18 bp, Synthetic construct
  source 1..18: mol_type = other DNA
ggagtctgagaaaaggga

SEQ ID NO: 715 - DNA, 18 bp, Synthetic construct
  source 1..18: mol_type = other DNA
gcatgagactttgaggtg

SEQ ID NO: 716 - DNA, 19 bp, Synthetic construct
  source 1..19: mol_type = other DNA
gatactgttgactgtagaa

SEQ ID NO: 717 - DNA, 19 bp, Synthetic construct
  source 1..19: mol_type = other DNA
gactgtagaaggctctgag

SEQ ID NO: 718 - DNA, 19 bp, Synthetic construct
  source 1..19: mol_type = other DNA
gcaatttggtgtgggagta

SEQ ID NO: 719 - DNA, 19 bp, Synthetic construct
  source 1..19: mol_type = other DNA
gaagtccccagcagaggct

SEQ ID NO: 720 - DNA, 19 bp, Synthetic construct
  source 1..19: mol_type = other DNA
gaggcatctgggcggaggg

SEQ ID NO: 721 - DNA, 19 bp, Synthetic construct
  source 1..19: mol_type = other DNA
tggggaagctgagggcacg

SEQ ID NO: 722 - DNA, 19 bp, Synthetic construct
  source 1..19: mol_type = other DNA
gctgagggcacgaggaggg

SEQ ID NO: 723 - DNA, 19 bp, Synthetic construct
  source 1..19: mol_type = other DNA
agggcacgaggaggggctg

SEQ ID NO: 724 - DNA, 19 bp, Synthetic construct
  source 1..19: mol_type = other DNA
ggagctgctgcctggctgg

SEQ ID NO: 725 - DNA, 19 bp, Synthetic construct
  source 1..19: mol_type = other DNA
tggggatgggggtgaggat

SEQ ID NO: 726 - DNA, 19 bp, Synthetic construct
  source 1..19: mol_type = other DNA
tgggggtgaggatgggaac

SEQ ID NO: 727 - DNA, 19 bp, Synthetic construct
  source 1..19: mol_type = other DNA
gaggatgggaacaggagtc

SEQ ID NO: 728 - DNA, 19 bp, Synthetic construct
  source 1..19: mol_type = other DNA
gcagctggggagagctggc

SEQ ID NO: 729 - DNA, 19 bp, Synthetic construct
  source 1..19: mol_type = other DNA
gctggggagagctggcgga

SEQ ID NO: 730 - DNA, 19 bp, Synthetic construct
  source 1..19: mol_type = other DNA
ggggagagctggcggatgc

SEQ ID NO: 731 - DNA, 19 bp, Synthetic construct
  source 1..19: mol_type = other DNA
gacgggggaacagatggtg

SEQ ID NO: 732 - DNA, 19 bp, Synthetic construct
  source 1..19: mol_type = other DNA
gaacagatggtgggaagag

SEQ ID NO: 733 - DNA, 19 bp, Synthetic construct
  source 1..19: mol_type = other DNA
gttggctgggaagggtgtg

SEQ ID NO: 734 - DNA, 19 bp, Synthetic construct
  source 1..19: mol_type = other DNA
taggaactggaattgagct

SEQ ID NO: 735 - DNA, 19 bp, Synthetic construct
  source 1..19: mol_type = other DNA
gatggttaaaggggtggta

SEQ ID NO: 736 - DNA, 19 bp, Synthetic construct
  source 1..19: mol_type = other DNA
ggtgtggttgggtgcagcc

SEQ ID NO: 737 - DNA, 19 bp, Synthetic construct
  source 1..19: mol_type = other DNA
gcagccttaagttgctacg

SEQ ID NO: 738 - DNA, 19 bp, Synthetic construct
  source 1..19: mol_type = other DNA
gctacgggaaagtgttgga

SEQ ID NO: 739 - DNA, 19 bp, Synthetic construct
  source 1..19: mol_type = other DNA
ggagggggagaagtcagag

SEQ ID NO: 740 - DNA, 19 bp, Synthetic construct
  source 1..19: mol_type = other DNA
gggggagaagtcagaggta

SEQ ID NO: 741 - DNA, 19 bp, Synthetic construct
  source 1..19: mol_type = other DNA
ggaggacccagcaggaatc

SEQ ID NO: 742 - DNA, 19 bp, Synthetic construct
  source 1..19: mol_type = other DNA
gtggtatcaaggaggaagt

SEQ ID NO: 743 - DNA, 19 bp, Synthetic construct
  source 1..19: mol_type = other DNA
gtagtcagatggtttgggg

SEQ ID NO: 744 - DNA, 19 bp, Synthetic construct
  source 1..19: mol_type = other DNA
gagagcctctgctggggac

SEQ ID NO: 745 - DNA, 19 bp, Synthetic construct
  source 1..19: mol_type = other DNA
acagaaagtctgttggggg

SEQ ID NO: 746 - DNA, 19 bp, Synthetic construct
  source 1..19: mol_type = other DNA
gaatttggtgaagacagaa

SEQ ID NO: 747 - DNA, 19 bp, Synthetic construct
  source 1..19: mol_type = other DNA
gtggactgaatttggtgaa

SEQ ID NO: 748 - DNA, 19 bp, Synthetic construct
  source 1..19: mol_type = other DNA
gcaacgcattgtgtaggaa

SEQ ID NO: 749 - DNA, 19 bp, Synthetic construct
  source 1..19: mol_type = other DNA
taggacccagcagggcgtg

SEQ ID NO: 750 - DNA, 19 bp, Synthetic construct
  source 1..19: mol_type = other DNA
gacaggtaggacccagcag

SEQ ID NO: 751 - DNA, 19 bp, Synthetic construct
  source 1..19: mol_type = other DNA
tgggtatggagtggagtct

SEQ ID NO: 752 - DNA, 19 bp, Synthetic construct
  source 1..19: mol_type = other DNA
ggggagggcagcatccgcc

SEQ ID NO: 753 - DNA, 20 bp, Synthetic construct
  source 1..20: mol_type = other DNA
gttgactgtagaaggctctg

SEQ ID NO: 754 - DNA, 19 bp, Synthetic construct
  source 1..19: mol_type = other DNA
gaggctgtgtgcttctgag

SEQ ID NO: 755 - DNA, 20 bp, Synthetic construct
  source 1..20: mol_type = other DNA
gagtgatcatatattagaag

SEQ ID NO: 756 - DNA, 20 bp, Synthetic construct
  source 1..20: mol_type = other DNA
gtctctgcccatcctcctgg

SEQ ID NO: 757 - DNA, 20 bp, Synthetic construct
  source 1..20: mol_type = other DNA
attatttagcatcactttgg

SEQ ID NO: 758 - DNA, 20 bp, Synthetic construct
  source 1..20: mol_type = other DNA
gactacaagggtaccatatt

SEQ ID NO: 759 - DNA, 20 bp, Synthetic construct
  source 1..20: mol_type = other DNA
tatgatctccagagaaattc

SEQ ID NO: 760 - DNA, 20 bp, Synthetic construct
  source 1..20: mol_type = other DNA
tgtgggagtaggcatggtag

SEQ ID NO: 761 - DNA, 20 bp, Synthetic construct
  source 1..20: mol_type = other DNA
cttgtcttgaggcatctggg

SEQ ID NO: 762 - DNA, 20 bp, Synthetic construct
  source 1..20: mol_type = other DNA
atctgccaccttctgcagga

SEQ ID NO: 763 - DNA, 20 bp, Synthetic construct
  source 1..20: mol_type = other DNA
ttgcacagaaagtctgttgg

SEQ ID NO: 764 - DNA, 20 bp, Synthetic construct
  source 1..20: mol_type = other DNA
tgaaattaatttcagaggtg

SEQ ID NO: 765 - DNA, 20 bp, Synthetic construct
  source 1..20: mol_type = other DNA
agggagtgtggtaaaattag

SEQ ID NO: 766 - DNA, 20 bp, Synthetic construct
  source 1..20: mol_type = other DNA
tcaaggaggaagtctcagct

SEQ ID NO: 767 - DNA, 20 bp, Synthetic construct
  source 1..20: mol_type = other DNA
ccaggaggatgggcagagac

SEQ ID NO: 768 - DNA, 20 bp, Synthetic construct
  source 1..20: mol_type = other DNA
ttatttagcatcactttggc

SEQ ID NO: 769 - DNA, 20 bp, Synthetic construct
  source 1..20: mol_type = other DNA
actacaagggtaccatattt

SEQ ID NO: 770 - DNA, 20 bp, Synthetic construct
  source 1..20: mol_type = other DNA
atgatctccagagaaattca

SEQ ID NO: 771 - DNA, 20 bp, Synthetic construct
  source 1..20: mol_type = other DNA
atctaagaagtccccagcag

SEQ ID NO: 772 - DNA, 20 bp, Synthetic construct
  source 1..20: mol_type = other DNA
gtcttgaggcatctgggcgg

SEQ ID NO: 773 - DNA, 20 bp, Synthetic construct
  source 1..20: mol_type = other DNA
caatatctgccaccttctgc

SEQ ID NO: 774 - DNA, 20 bp, Synthetic construct
  source 1..20: mol_type = other DNA
gttgcacagaaagtctgttg

SEQ ID NO: 775 - DNA, 20 bp, Synthetic construct
  source 1..20: mol_type = other DNA
gaaattaatttcagaggtgt

SEQ ID NO: 776 - DNA, 20 bp, Synthetic construct
  source 1..20: mol_type = other DNA
gggagtgtggtaaaattaga

SEQ ID NO: 777 - DNA, 20 bp, Synthetic construct
  source 1..20: mol_type = other DNA
acttcctccttgataccacc

SEQ ID NO: 778 - DNA, 20 bp, Synthetic construct
  source 1..20: mol_type = other DNA
ccagtctctgcccatcctcc

SEQ ID NO: 779 - DNA, 20 bp, Synthetic construct
  source 1..20: mol_type = other DNA
ccccaaaccatctgactaca

SEQ ID NO: 780 - DNA, 20 bp, Synthetic construct
  source 1..20: mol_type = other DNA
aaagagtgttaacccaaata

SEQ ID NO: 781 - DNA, 20 bp, Synthetic construct
  source 1..20: mol_type = other DNA
caaattgccctgaatttctc

SEQ ID NO: 782 - DNA, 20 bp, Synthetic construct
  source 1..20: mol_type = other DNA
caagctgagagcctctgctg

SEQ ID NO: 783 - DNA, 20 bp, Synthetic construct
  source 1..20: mol_type = other DNA
tcttgaggcatctgggcgga

SEQ ID NO: 784 - DNA, 20 bp, Synthetic construct
  source 1..20: mol_type = other DNA
ctgcagaaggtggcagatat

SEQ ID NO: 785 - DNA, 20 bp, Synthetic construct
  source 1..20: mol_type = other DNA
agttgcacagaaagtctgtt

SEQ ID NO: 786 - DNA, 20 bp, Synthetic construct
  source 1..20: mol_type = other DNA
aaattaatttcagaggtgtg

SEQ ID NO: 787 - DNA, 20 bp, Synthetic construct
  source 1..20: mol_type = other DNA
gaaacagaaatctgaccgct

SEQ ID NO: 788 - DNA, 20 bp, Synthetic construct
  source 1..20: mol_type = other DNA
tcctccttgataccaccagg

SEQ ID NO: 789 - DNA, 20 bp, Synthetic construct
  source 1..20: mol_type = other DNA
agacactaactttctcccta

SEQ ID NO: 790 - DNA, 20 bp, Synthetic construct
  source 1..20: mol_type = other DNA
ccttgtagtcagatggtttg

SEQ ID NO: 791 - DNA, 20 bp, Synthetic construct
  source 1..20: mol_type = other DNA
tatttgggttaacactcttt

SEQ ID NO: 792 - DNA, 20 bp, Synthetic construct
  source 1..20: mol_type = other DNA
cagagaaattcagggcaatt

SEQ ID NO: 793 - DNA, 20 bp, Synthetic construct
  source 1..20: mol_type = other DNA
acaagctgagagcctctgct

SEQ ID NO: 794 - DNA, 20 bp, Synthetic construct
  source 1..20: mol_type = other DNA
tgggcggagggctatgatac

SEQ ID NO: 795 - DNA, 20 bp, Synthetic construct
  source 1..20: mol_type = other DNA
aggtggcagatattggcagc

SEQ ID NO: 796 - DNA, 20 bp, Synthetic construct
  source 1..20: mol_type = other DNA
aagttgcacagaaagtctgt

SEQ ID NO: 797 - DNA, 20 bp, Synthetic construct
  source 1..20: mol_type = other DNA
ttaatttcagaggtgtgggg

SEQ ID NO: 798 - DNA, 20 bp, Synthetic construct
  source 1..20: mol_type = other DNA
aaacagaaatctgaccgctt

SEQ ID NO: 799 - DNA, 20 bp, Synthetic construct
  source 1..20: mol_type = other DNA
tcctcctggtggtatcaagg

SEQ ID NO: 800 - DNA, 20 bp, Synthetic construct
  source 1..20: mol_type = other DNA
gacactaactttctccctat

SEQ ID NO: 801 - DNA, 20 bp, Synthetic construct
  source 1..20: mol_type = other DNA
cccaaaccatctgactacaa

SEQ ID NO: 802 - DNA, 20 bp, Synthetic construct
  source 1..20: mol_type = other DNA
tgtcttgggatgaaaatgac

SEQ ID NO: 803 - DNA, 20 bp, Synthetic construct
  source 1..20: mol_type = other DNA
aaattcagggcaatttggtg

SEQ ID NO: 804 - DNA, 20 bp, Synthetic construct
  source 1..20: mol_type = other DNA
gacaagctgagagcctctgc

SEQ ID NO: 805 - DNA, 20 bp, Synthetic construct
  source 1..20: mol_type = other DNA
tactggccccatcctgcaga

SEQ ID NO: 806 - DNA, 20 bp, Synthetic construct
  source 1..20: mol_type = other DNA
attggcagctggcaccagtg

SEQ ID NO: 807 - DNA, 20 bp, Synthetic construct
  source 1..20: mol_type = other DNA
accaaattcagtccacagta

SEQ ID NO: 808 - DNA, 20 bp, Synthetic construct
  source 1..20: mol_type = other DNA
taatttcagaggtgtgggga

SEQ ID NO: 809 - DNA, 20 bp, Synthetic construct
  source 1..20: mol_type = other DNA
aacagaaatctgaccgcttg

SEQ ID NO: 810 - DNA, 20 bp, Synthetic construct
  source 1..20: mol_type = other DNA
ccatcctcctggtggtatca

SEQ ID NO: 811 - DNA, 20 bp, Synthetic construct
  source 1..20: mol_type = other DNA
aaataatactgactcccata

SEQ ID NO: 812 - DNA, 20 bp, Synthetic construct
  source 1..20: mol_type = other DNA
cccttgtagtcagatggttt

SEQ ID NO: 813 - DNA, 20 bp, Synthetic construct
  source 1..20: mol_type = other DNA
cttgggatgaaaatgacagg

SEQ ID NO: 814 - DNA, 20 bp, Synthetic construct
  source 1..20: mol_type = other DNA
aattcagggcaatttggtgt

SEQ ID NO: 815 - DNA, 20 bp, Synthetic construct
  source 1..20: mol_type = other DNA
gaggctctcagcttgtcttg

SEQ ID NO: 816 - DNA, 20 bp, Synthetic construct
  source 1..20: mol_type = other DNA
tggccccatcctgcagaagg

SEQ ID NO: 817 - DNA, 20 bp, Synthetic construct
  source 1..20: mol_type = other DNA
tgatcacaatggaaccgcac

SEQ ID NO: 818 - DNA, 20 bp, Synthetic construct
  source 1..20: mol_type = other DNA
tccttactgtggactgaatt

SEQ ID NO: 819 - DNA, 20 bp, Synthetic construct
  source 1..20: mol_type = other DNA
agaggtgtggggagggctta

SEQ ID NO: 820 - DNA, 20 bp, Synthetic construct
  source 1..20: mol_type = other DNA
accgcttggggccaccttgc

SEQ ID NO: 821 - DNA, 20 bp, Synthetic construct
  source 1..20: mol_type = other DNA
ccttgataccaccaggagga

SEQ ID NO: 822 - DNA, 20 bp, Synthetic construct
  source 1..20: mol_type = other DNA
taaataatactgactcccat

SEQ ID NO: 823 - DNA, 20 bp, Synthetic construct
  source 1..20: mol_type = other DNA
acccttgtagtcagatggtt

SEQ ID NO: 824 - DNA, 20 bp, Synthetic construct
  source 1..20: mol_type = other DNA
ttgggatgaaaatgacaggt

SEQ ID NO: 825 - DNA, 20 bp, Synthetic construct
  source 1..20: mol_type = other DNA
gggcaatttggtgtgggagt

SEQ ID NO: 826 - DNA, 20 bp, Synthetic construct
  source 1..20: mol_type = other DNA
tcagcttgtcttgaggcatc

SEQ ID NO: 827 - DNA, 20 bp, Synthetic construct
  source 1..20: mol_type = other DNA
ctgccaccttctgcaggatg

SEQ ID NO: 828 - DNA, 20 bp, Synthetic construct
  source 1..20: mol_type = other DNA
ttcagaaatgatgatcacaa

SEQ ID NO: 829 - DNA, 20 bp, Synthetic construct
  source 1..20: mol_type = other DNA
ttaatttcacttccttactg

SEQ ID NO: 830 - DNA, 20 bp, Synthetic construct
  source 1..20: mol_type = other DNA
gaggtgtggggagggcttaa

SEQ ID NO: 831 - DNA, 20 bp, Synthetic construct
  source 1..20: mol_type = other DNA
cttgataccaccaggaggat

SEQ ID NO: 832 - DNA, 20 bp, Synthetic construct
  source 1..20: mol_type = other DNA
agtattatttagcatcactt

SEQ ID NO: 833 - DNA, 20 bp, Synthetic construct
  source 1..20: mol_type = other DNA
atggtacccttgtagtcaga

SEQ ID NO: 834 - DNA, 20 bp, Synthetic construct
  source 1..20: mol_type = other DNA
atttctctggagatcataag

SEQ ID NO: 835 - DNA, 20 bp, Synthetic construct
  source 1..20: mol_type = other DNA
atttggtgtgggagtaggca

SEQ ID NO: 836 - DNA, 20 bp, Synthetic construct
  source 1..20: mol_type = other DNA
cagcttgtcttgaggcatct

SEQ ID NO: 837 - DNA, 20 bp, Synthetic construct
  source 1..20: mol_type = other DNA
tctgccaccttctgcaggat

SEQ ID NO: 838 - DNA, 20 bp, Synthetic construct
  source 1..20: mol_type = other DNA
tctgaacgtcagactgttga

SEQ ID NO: 839 - DNA, 20 bp, Synthetic construct
  source 1..20: mol_type = other DNA
ggaagtgaaattaatttcag

SEQ ID NO: 840 - DNA, 20 bp, Synthetic construct
  source 1..20: mol_type = other DNA
ggggagggcttaagggagtg

SEQ ID NO: 841 - DNA, 20 bp, Synthetic construct
  source 1..20: mol_type = other DNA
ccctgcaaggtggccccaag

SEQ ID NO: 842 - DNA, 20 bp, Synthetic construct
  source 1..20: mol_type = other DNA
tgcatgttggcttagcttgg

SEQ ID NO: 843 - DNA, 19 bp, Synthetic construct
  source 1..19: mol_type = other DNA
gaggctgtgtgcttctgag

SEQ ID NO: 844 - DNA, 20 bp, Synthetic construct
  source 1..20: mol_type = other DNA
ggcatccttggggaagctga

SEQ ID NO: 845 - DNA, 20 bp, Synthetic construct
  source 1..20: mol_type = other DNA
aggcagcagctcccggagtc

SEQ ID NO: 846 - DNA, 20 bp, Synthetic construct
  source 1..20: mol_type = other DNA
tgcctggctccacgccctgc

SEQ ID NO: 847 - DNA, 20 bp, Synthetic construct
  source 1..20: mol_type = other DNA
gtcagagccccaaggtaaaa

SEQ ID NO: 848 - DNA, 20 bp, Synthetic construct
  source 1..20: mol_type = other DNA
acagagaaaccattctgaat

SEQ ID NO: 849 - DNA, 20 bp, Synthetic construct
  source 1..20: mol_type = other DNA
ctgaattggggatgggggtg

SEQ ID NO: 850 - DNA, 20 bp, Synthetic construct
  source 1..20: mol_type = other DNA
gtcctgctggggcaggccat

SEQ ID NO: 851 - DNA, 20 bp, Synthetic construct
  source 1..20: mol_type = other DNA
gacctgaagtctccctccgg

SEQ ID NO: 852 - DNA, 20 bp, Synthetic construct
  source 1..20: mol_type = other DNA
ccgcttggggccaccttgca

SEQ ID NO: 853 - DNA, 20 bp, Synthetic construct
  source 1..20: mol_type = other DNA
gcatgttggcttagcttggc

SEQ ID NO: 854 - DNA, 20 bp, Synthetic construct
  source 1..20: mol_type = other DNA
aggctgtgtgcttctgagct

SEQ ID NO: 855 - DNA, 20 bp, Synthetic construct
  source 1..20: mol_type = other DNA
tcgtgccctcagcttcccca

SEQ ID NO: 856 - DNA, 20 bp, Synthetic construct
  source 1..20: mol_type = other DNA
agactccgggagctgctgcc

SEQ ID NO: 857 - DNA, 20 bp, Synthetic construct
  source 1..20: mol_type = other DNA
gcctggctccacgccctgct

SEQ ID NO: 858 - DNA, 20 bp, Synthetic construct
  source 1..20: mol_type = other DNA
gagccccaaggtaaaaaggc

SEQ ID NO: 859 - DNA, 20 bp, Synthetic construct
  source 1..20: mol_type = other DNA
cagagaaaccattctgaatt

SEQ ID NO: 860 - DNA, 20 bp, Synthetic construct
  source 1..20: mol_type = other DNA
attggggatgggggtgagga

SEQ ID NO: 861 - DNA, 20 bp, Synthetic construct
  source 1..20: mol_type = other DNA
ttccaatggcctgccccagc

SEQ ID NO: 862 - DNA, 20 bp, Synthetic construct
  source 1..20: mol_type = other DNA
gctgacctgaagtctccctc

SEQ ID NO: 863 - DNA, 20 bp, Synthetic construct
  source 1..20: mol_type = other DNA
aaaaaactctccctgcaagg

SEQ ID NO: 864 - DNA, 20 bp, Synthetic construct
  source 1..20: mol_type = other DNA
tagcttggcgggctcccaac

SEQ ID NO: 865 - DNA, 20 bp, Synthetic construct
  source 1..20: mol_type = other DNA
cttctgagctgggcatccga

SEQ ID NO: 866 - DNA, 20 bp, Synthetic construct
  source 1..20: mol_type = other DNA
ttggggaagctgagggcacg

SEQ ID NO: 867 - DNA, 20 bp, Synthetic construct
  source 1..20: mol_type = other DNA
tccgggagctgctgcctggc

SEQ ID NO: 868 - DNA, 20 bp, Synthetic construct
  source 1..20: mol_type = other DNA
acccagcagggcgtggagcc

SEQ ID NO: 869 - DNA, 20 bp, Synthetic construct
  source 1..20: mol_type = other DNA
agccccaaggtaaaaaggcc

SEQ ID NO: 870 - DNA, 20 bp, Synthetic construct
  source 1..20: mol_type = other DNA
agagaaaccattctgaattg

SEQ ID NO: 871 - DNA, 20 bp, Synthetic construct
  source 1..20: mol_type = other DNA
ttggggatgggggtgaggat

SEQ ID NO: 872 - DNA, 20 bp, Synthetic construct
  source 1..20: mol_type = other DNA
aactctttcacatcttccaa

SEQ ID NO: 873 - DNA, 20 bp, Synthetic construct
  source 1..20: mol_type = other DNA
agggagacttcaggtcagcc

SEQ ID NO: 874 - DNA, 20 bp, Synthetic construct
  source 1..20: mol_type = other DNA
tcaaaaaaactctccctgca

SEQ ID NO: 875 - DNA, 20 bp, Synthetic construct
  source 1..20: mol_type = other DNA
gcgggctcccaactggtgac

SEQ ID NO: 876 - DNA, 20 bp, Synthetic construct
  source 1..20: mol_type = other DNA
tgggcatccgaaggcatcct

SEQ ID NO: 877 - DNA, 20 bp, Synthetic construct
  source 1..20: mol_type = other DNA
gggaagctgagggcacgagg

SEQ ID NO: 878 - DNA, 20 bp, Synthetic construct
  source 1..20: mol_type = other DNA
cccagccaggcagcagctcc

SEQ ID NO: 879 - DNA, 20 bp, Synthetic construct
  source 1..20: mol_type = other DNA
aggtaggacccagcagggcg

SEQ ID NO: 880 - DNA, 20 bp, Synthetic construct
  source 1..20: mol_type = other DNA
gctaaattaagatgctttcc

SEQ ID NO: 881 - DNA, 20 bp, Synthetic construct
  source 1..20: mol_type = other DNA
aaaccattctgaattgggga

SEQ ID NO: 882 - DNA, 20 bp, Synthetic construct
  source 1..20: mol_type = other DNA
atgggggtgaggatgggaac

SEQ ID NO: 883 - DNA, 20 bp, Synthetic construct
  source 1..20: mol_type = other DNA
agttgtctatttccttccac

SEQ ID NO: 884 - DNA, 20 bp, Synthetic construct
  source 1..20: mol_type = other DNA
cttcaggtcagccaggtgtc

SEQ ID NO: 885 - DNA, 20 bp, Synthetic construct
  source 1..20: mol_type = other DNA
acatgcaaagaaacaagtga

SEQ ID NO: 886 - DNA, 20 bp, Synthetic construct
  source 1..20: mol_type = other DNA
tcactaaccagtcaccagtt

SEQ ID NO: 887 - DNA, 20 bp, Synthetic construct
  source 1..20: mol_type = other DNA
gggcatccgaaggcatcctt

SEQ ID NO: 888 - DNA, 20 bp, Synthetic construct
  source 1..20: mol_type = other DNA
ggaagctgagggcacgagga

SEQ ID NO: 889 - DNA, 20 bp, Synthetic construct
  source 1..20: mol_type = other DNA
ccgggagctgctgcctggct

SEQ ID NO: 890 - DNA, 20 bp, Synthetic construct
  source 1..20: mol_type = other DNA
ctgacaggtaggacccagca

SEQ ID NO: 891 - DNA, 20 bp, Synthetic construct
  source 1..20: mol_type = other DNA
atttagcgtgcagtctcagc

SEQ ID NO: 892 - DNA, 20 bp, Synthetic construct
  source 1..20: mol_type = other DNA
aaccattctgaattggggat

SEQ ID NO: 893 - DNA, 20 bp, Synthetic construct
  source 1..20: mol_type = other DNA
aacaggagtctgtgtcctgc

SEQ ID NO: 894 - DNA, 20 bp, Synthetic construct
  source 1..20: mol_type = other DNA
tgtctatttccttccaccgg

SEQ ID NO: 895 - DNA, 20 bp, Synthetic construct
  source 1..20: mol_type = other DNA
tggttcatactccagacacc

SEQ ID NO: 896 - DNA, 20 bp, Synthetic construct
  source 1..20: mol_type = other DNA
aacatgcaaagaaacaagtg

SEQ ID NO: 897 - DNA, 20 bp, Synthetic construct
  source 1..20: mol_type = other DNA
atcactaaccagtcaccagt

SEQ ID NO: 898 - DNA, 20 bp, Synthetic construct
  source 1..20: mol_type = other DNA
ggcatccgaaggcatccttg

SEQ ID NO: 899 - DNA, 20 bp, Synthetic construct
  source 1..20: mol_type = other DNA
gaagctgagggcacgaggag

SEQ ID NO: 900 - DNA, 20 bp, Synthetic construct
  source 1..20: mol_type = other DNA
attgtgtaggaatcccagcc

SEQ ID NO: 901 - DNA, 20 bp, Synthetic construct
  source 1..20: mol_type = other DNA
tctgacaggtaggacccagc

SEQ ID NO: 902 - DNA, 20 bp, Synthetic construct
  source 1..20: mol_type = other DNA
ctctgtttatctggaatggc

SEQ ID NO: 903 - DNA, 20 bp, Synthetic construct
  source 1..20: mol_type = other DNA
accattctgaattggggatg

SEQ ID NO: 904 - DNA, 20 bp, Synthetic construct
  source 1..20: mol_type = other DNA
acaggagtctgtgtcctgct

SEQ ID NO: 905 - DNA, 20 bp, Synthetic construct
  source 1..20: mol_type = other DNA
gtctatttccttccaccgga

SEQ ID NO: 906 - DNA, 20 bp, Synthetic construct
  source 1..20: mol_type = other DNA
aaccatgtatcagcaccgaa

SEQ ID NO: 907 - DNA, 20 bp, Synthetic construct
  source 1..20: mol_type = other DNA
tcacttgtttctttgcatgt

SEQ ID NO: 908 - DNA, 20 bp, Synthetic construct
  source 1..20: mol_type = other DNA
ctggtgactggttagtgatg

SEQ ID NO: 909 - DNA, 20 bp, Synthetic construct
  source 1..20: mol_type = other DNA
agcttccccaaggatgcctt

SEQ ID NO: 910 - DNA, 20 bp, Synthetic construct
  source 1..20: mol_type = other DNA
gaggaggggctgccagactc

SEQ ID NO: 911 - DNA, 20 bp, Synthetic construct
  source 1..20: mol_type = other DNA
ttcctacacaatgcgttgcc

SEQ ID NO: 912 - DNA, 20 bp, Synthetic construct
  source 1..20: mol_type = other DNA
tcctacctgtcagagcccca

SEQ ID NO: 913 - DNA, 20 bp, Synthetic construct
  source 1..20: mol_type = other DNA
gtttctctgtttatctggaa

SEQ ID NO: 914 - DNA, 20 bp, Synthetic construct
  source 1..20: mol_type = other DNA
ccattctgaattggggatgg

SEQ ID NO: 915 - DNA, 20 bp, Synthetic construct
  source 1..20: mol_type = other DNA
caggagtctgtgtcctgctg

SEQ ID NO: 916 - DNA, 20 bp, Synthetic construct
  source 1..20: mol_type = other DNA
tgaagtctccctccggtgga

SEQ ID NO: 917 - DNA, 20 bp, Synthetic construct
  source 1..20: mol_type = other DNA
ctttgcatgttggcttagct

SEQ ID NO: 918 - DNA, 20 bp, Synthetic construct
  source 1..20: mol_type = other DNA
tagtgatgaggctagtgatg

SEQ ID NO: 919 - DNA, 20 bp, Synthetic construct
  source 1..20: mol_type = other DNA
aggcatccttggggaagctg

SEQ ID NO: 920 - DNA, 20 bp, Synthetic construct
  source 1..20: mol_type = other DNA
aggaggggctgccagactcc

SEQ ID NO: 921 - DNA, 20 bp, Synthetic construct
  source 1..20: mol_type = other DNA
agccaggcaacgcattgtgt

SEQ ID NO: 922 - DNA, 20 bp, Synthetic construct
  source 1..20: mol_type = other DNA
accttggggctctgacaggt

SEQ ID NO: 923 - DNA, 20 bp, Synthetic construct
  source 1..20: mol_type = other DNA
gaatggtttctctgtttatc

SEQ ID NO: 924 - DNA, 20 bp, Synthetic construct
  source 1..20: mol_type = other DNA
cccccatccccaattcagaa

SEQ ID NO: 925 - DNA, 20 bp, Synthetic construct
  source 1..20: mol_type = other DNA
agtctgtgtcctgctggggc

SEQ ID NO: 926 - DNA, 20 bp, Synthetic construct
  source 1..20: mol_type = other DNA
ttccaccggagggagacttc

SEQ ID NO: 927 - DNA, 20 bp, Synthetic construct
  source 1..20: mol_type = other DNA
aacctttcggtgctgataca

SEQ ID NO: 928 - DNA, 20 bp, Synthetic construct
  source 1..20: mol_type = other DNA
accttgctgtgggccgagcc

SEQ ID NO: 929 - DNA, 20 bp, Synthetic construct
  source 1..20: mol_type = other DNA
cccctcagtatttacccaaa

SEQ ID NO: 930 - DNA, 20 bp, Synthetic construct
  source 1..20: mol_type = other DNA
tctgggtatggagtggagtc

SEQ ID NO: 931 - DNA, 20 bp, Synthetic construct
  source 1..20: mol_type = other DNA
caaaattggagtcagccttg

SEQ ID NO: 932 - DNA, 20 bp, Synthetic construct
  source 1..20: mol_type = other DNA
cagcagctggggagagctgg

SEQ ID NO: 933 - DNA, 20 bp, Synthetic construct
  source 1..20: mol_type = other DNA
aaacaacaccattaggaaac

SEQ ID NO: 934 - DNA, 20 bp, Synthetic construct
  source 1..20: mol_type = other DNA
ttaaaaagggtcaggggacg

SEQ ID NO: 935 - DNA, 20 bp, Synthetic construct
  source 1..20: mol_type = other DNA
ctgccttcagagccggtgcc

SEQ ID NO: 936 - DNA, 20 bp, Synthetic construct
  source 1..20: mol_type = other DNA
gccgcggccccagagctggc

SEQ ID NO: 937 - DNA, 20 bp, Synthetic construct
  source 1..20: mol_type = other DNA
gaggccaccagcagcgcgcg

SEQ ID NO: 938 - DNA, 20 bp, Synthetic construct
  source 1..20: mol_type = other DNA
gtctgacttctagaaccttt

SEQ ID NO: 939 - DNA, 20 bp, Synthetic construct
  source 1..20: mol_type = other DNA
aggcgagaagaccttgctgt

SEQ ID NO: 940 - DNA, 20 bp, Synthetic construct
  source 1..20: mol_type = other DNA
ccctttgggtaaatactgag

SEQ ID NO: 941 - DNA, 20 bp, Synthetic construct
  source 1..20: mol_type = other DNA
ctgcttctctgggtatggag

SEQ ID NO: 942 - DNA, 20 bp, Synthetic construct
  source 1..20: mol_type = other DNA
ggctcaacagctacacctca

SEQ ID NO: 943 - DNA, 20 bp, Synthetic construct
  source 1..20: mol_type = other DNA
ccattaggaaactgggggga

SEQ ID NO: 944 - DNA, 20 bp, Synthetic construct
  source 1..20: mol_type = other DNA
cctaatggtgttgtttaaaa

SEQ ID NO: 945 - DNA, 20 bp, Synthetic construct
  source 1..20: mol_type = other DNA
taaaaagggtcaggggacgg

SEQ ID NO: 946 - DNA, 20 bp, Synthetic construct
  source 1..20: mol_type = other DNA
caccggctctgaaggcagca

SEQ ID NO: 947 - DNA, 20 bp, Synthetic construct
  source 1..20: mol_type = other DNA
tcccgccagctctggggccg

SEQ ID NO: 948 - DNA, 20 bp, Synthetic construct
  source 1..20: mol_type = other DNA
aggccaccagcagcgcgcgc

SEQ ID NO: 949 - DNA, 20 bp, Synthetic construct
  source 1..20: mol_type = other DNA
ggttctagaagtcagacttt

SEQ ID NO: 950 - DNA, 20 bp, Synthetic construct
  source 1..20: mol_type = other DNA
gaggcgagaagaccttgctg

SEQ ID NO: 951 - DNA, 20 bp, Synthetic construct
  source 1..20: mol_type = other DNA
acccctcagtatttacccaa

SEQ ID NO: 952 - DNA, 20 bp, Synthetic construct
  source 1..20: mol_type = other DNA
cactccatacccagagaagc

SEQ ID NO: 953 - DNA, 20 bp, Synthetic construct
  source 1..20: mol_type = other DNA
gctgttgagccctcagcagc

SEQ ID NO: 954 - DNA, 20 bp, Synthetic construct
  source 1..20: mol_type = other DNA
ccctccccccagtttcctaa

SEQ ID NO: 955 - DNA, 20 bp, Synthetic construct
  source 1..20: mol_type = other DNA
ctaatggtgttgtttaaaaa

SEQ ID NO: 956 - DNA, 20 bp, Synthetic construct
  source 1..20: mol_type = other DNA
tcaggggacgggggaacaga

SEQ ID NO: 957 - DNA, 20 bp, Synthetic construct
  source 1..20: mol_type = other DNA
tgccatgctgccttcagagc

SEQ ID NO: 958 - DNA, 20 bp, Synthetic construct
  source 1..20: mol_type = other DNA
gcggccccagagctggcggg

SEQ ID NO: 959 - DNA, 20 bp, Synthetic construct
  source 1..20: mol_type = other DNA
gctcccgcgcgcgctgctgg

SEQ ID NO: 960 - DNA, 20 bp, Synthetic construct
  source 1..20: mol_type = other DNA
gttctagaagtcagactttc

SEQ ID NO: 961 - DNA, 20 bp, Synthetic construct
  source 1..20: mol_type = other DNA
aaggtcttctcgcctccctt

SEQ ID NO: 962 - DNA, 20 bp, Synthetic construct
  source 1..20: mol_type = other DNA
atactgaggggtgcctctgc

SEQ ID NO: 963 - DNA, 20 bp, Synthetic construct
  source 1..20: mol_type = other DNA
actccatacccagagaagca

SEQ ID NO: 964 - DNA, 20 bp, Synthetic construct
  source 1..20: mol_type = other DNA
ctgttgagccctcagcagct

SEQ ID NO: 965 - DNA, 20 bp, Synthetic construct
  source 1..20: mol_type = other DNA
accattaggaaactgggggg

SEQ ID NO: 966 - DNA, 20 bp, Synthetic construct
  source 1..20: mol_type = other DNA
ggtgttgtttaaaaagggtc

SEQ ID NO: 967 - DNA, 20 bp, Synthetic construct
  source 1..20: mol_type = other DNA
ggggacgggggaacagatgg

SEQ ID NO: 968 - DNA, 20 bp, Synthetic construct
  source 1..20: mol_type = other DNA
cggggaggtaggatgaccag

SEQ ID NO: 969 - DNA, 20 bp, Synthetic construct
  source 1..20: mol_type = other DNA
cggccccagagctggcggga

SEQ ID NO: 970 - DNA, 20 bp, Synthetic construct
  source 1..20: mol_type = other DNA
cgcgggagcccggggaacag

SEQ ID NO: 971 - DNA, 20 bp, Synthetic construct
  source 1..20: mol_type = other DNA
gtcactaactctcagcatgc

SEQ ID NO: 972 - DNA, 20 bp, Synthetic construct
  source 1..20: mol_type = other DNA
aggtcttctcgcctcccttt

SEQ ID NO: 973 - DNA, 20 bp, Synthetic construct
  source 1..20: mol_type = other DNA
tgaggggtgcctctgcagga

SEQ ID NO: 974 - DNA, 20 bp, Synthetic construct
  source 1..20: mol_type = other DNA
tttccctgcttctctgggta

SEQ ID NO: 975 - DNA, 20 bp, Synthetic construct
  source 1..20: mol_type = other DNA
tgttgagccctcagcagctg

SEQ ID NO: 976 - DNA, 20 bp, Synthetic construct
  source 1..20: mol_type = other DNA
aacaccattaggaaactggg

SEQ ID NO: 977 - DNA, 20 bp, Synthetic construct
  source 1..20: mol_type = other DNA
gtgttgtttaaaaagggtca

SEQ ID NO: 978 - DNA, 20 bp, Synthetic construct
  source 1..20: mol_type = other DNA
gggacgggggaacagatggt

SEQ ID NO: 979 - DNA, 20 bp, Synthetic construct
  source 1..20: mol_type = other DNA
gtctgtggcagctcgtccgc

SEQ ID NO: 980 - DNA, 20 bp, Synthetic construct
  source 1..20: mol_type = other DNA
tctccctcccgccagctctg

SEQ ID NO: 981 - DNA, 20 bp, Synthetic construct
  source 1..20: mol_type = other DNA
ggagcccggggaacagcggt

SEQ ID NO: 982 - DNA, 20 bp, Synthetic construct
  source 1..20: mol_type = other DNA
taactctcagcatgctggcc

SEQ ID NO: 983 - DNA, 20 bp, Synthetic construct
  source 1..20: mol_type = other DNA
ctcagtatttacccaaaggg

SEQ ID NO: 984 - DNA, 20 bp, Synthetic construct
  source 1..20: mol_type = other DNA
gaggggtgcctctgcaggac

SEQ ID NO: 985 - DNA, 20 bp, Synthetic construct
  source 1..20: mol_type = other DNA
tttggtttccctgcttctct

SEQ ID NO: 986 - DNA, 20 bp, Synthetic construct
  source 1..20: mol_type = other DNA
cagctctccccagctgctga

SEQ ID NO: 987 - DNA, 20 bp, Synthetic construct
  source 1..20: mol_type = other DNA
caacaccattaggaaactgg

SEQ ID NO: 988 - DNA, 20 bp, Synthetic construct
  source 1..20: mol_type = other DNA
tgttgtttaaaaagggtcag

SEQ ID NO: 989 - DNA, 20 bp, Synthetic construct
  source 1..20: mol_type = other DNA
aagagcacagtgcagacacc

SEQ ID NO: 990 - DNA, 20 bp, Synthetic construct
  source 1..20: mol_type = other DNA
gagctgccacagacttgccg

SEQ ID NO: 991 - DNA, 20 bp, Synthetic construct
  source 1..20: mol_type = other DNA
ctctccctcccgccagctct

SEQ ID NO: 992 - DNA, 20 bp, Synthetic construct
  source 1..20: mol_type = other DNA
gtcacctaccgctgttcccc

SEQ ID NO: 993 - DNA, 20 bp, Synthetic construct
  source 1..20: mol_type = other DNA
ctcagcatgctggcctggct

SEQ ID NO: 994 - DNA, 20 bp, Synthetic construct
  source 1..20: mol_type = other DNA
ctccctttgggtaaatactg

SEQ ID NO: 995 - DNA, 20 bp, Synthetic construct
  source 1..20: mol_type = other DNA
gcagaggtcccgtcctgcag

SEQ ID NO: 996 - DNA, 20 bp, Synthetic construct
  source 1..20: mol_type = other DNA
agaagcagggaaaccaaaat

SEQ ID NO: 997 - DNA, 20 bp, Synthetic construct
  source 1..20: mol_type = other DNA
ccagctctccccagctgctg

SEQ ID NO: 998 - DNA, 20 bp, Synthetic construct
  source 1..20: mol_type = other DNA
acaacaccattaggaaactg

SEQ ID NO: 999 - DNA, 20 bp, Synthetic construct
  source 1..20: mol_type = other DNA
gtttaaaaagggtcagggga

SEQ ID NO: 1000 - DNA, 20 bp, Synthetic construct
  source 1..20: mol_type = other DNA
acagtgcagacacctggcac

SEQ ID NO: 1001 - DNA, 20 bp, Synthetic construct
  source 1..20: mol_type = other DNA
acttgccgcggccccagagc

SEQ ID NO: 1002 - DNA, 20 bp, Synthetic construct
  source 1..20: mol_type = other DNA
ccagagctggcgggagggag

SEQ ID NO: 1003 - DNA, 20 bp, Synthetic construct
  source 1..20: mol_type = other DNA
gcctggctcggcccacagca

SEQ ID NO: 1004 - DNA, 20 bp, Synthetic construct
  source 1..20: mol_type = other DNA
tccctttgggtaaatactga

SEQ ID NO: 1005 - DNA, 20 bp, Synthetic construct
  source 1..20: mol_type = other DNA
tatggagtggagtctggcag

SEQ ID NO: 1006 - DNA, 20 bp, Synthetic construct
  source 1..20: mol_type = other DNA
ctcaaggctgactccaattt

SEQ ID NO: 1007 - DNA, 20 bp, Synthetic construct
  source 1..20: mol_type = other DNA
cctcagcagctggggagagc

SEQ ID NO: 1008 - DNA, 20 bp, Synthetic construct
  source 1..20: mol_type = other DNA
aacaacaccattaggaaact

SEQ ID NO: 1009 - DNA, 20 bp, Synthetic construct
  source 1..20: mol_type = other DNA
tttaaaaagggtcaggggac

SEQ ID NO: 1010 - DNA, 20 bp, Synthetic construct
  source 1..20: mol_type = other DNA
acacctggcaccggctctga

SEQ ID NO: 1011 - DNA, 20 bp, Synthetic construct
  source 1..20: mol_type = other DNA
tgccgcggccccagagctgg

SEQ ID NO: 1012 - DNA, 20 bp, Synthetic construct
  source 1..20: mol_type = other DNA
cctctccctcccgccagctc

SEQ ID NO: 1013 - DNA, 20 bp, Synthetic construct
  source 1..20: mol_type = other DNA
ggtcacctaccgctgttccc

SEQ ID NO: 1014 - DNA, 20 bp, Synthetic construct
  source 1..20: mol_type = other DNA
cagagtcgttgcggggatgc

SEQ ID NO: 1015 - DNA, 20 bp, Synthetic construct
  source 1..20: mol_type = other DNA
ggagccgggaacccggagct

SEQ ID NO: 1016 - DNA, 20 bp, Synthetic construct
  source 1..20: mol_type = other DNA
aggggttacagaggagactt

SEQ ID NO: 1017 - DNA, 20 bp, Synthetic construct
  source 1..20: mol_type = other DNA
atccccgcaacgactctgcg

SEQ ID NO: 1018 - DNA, 20 bp, Synthetic construct
  source 1..20: mol_type = other DNA
caagccaagctccgggttcc

SEQ ID NO: 1019 - DNA, 20 bp, Synthetic construct
  source 1..20: mol_type = other DNA
agtctcctctgtaaccccta

SEQ ID NO: 1020 - DNA, 20 bp, Synthetic construct
  source 1..20: mol_type = other DNA
tccccgcaacgactctgcgc

SEQ ID NO: 1021 - DNA, 20 bp, Synthetic construct
  source 1..20: mol_type = other DNA
ggcacagcaagccaagctcc

SEQ ID NO: 1022 - DNA, 20 bp, Synthetic construct
  source 1..20: mol_type = other DNA
tcctctgtaacccctaaggt

SEQ ID NO: 1023 - DNA, 20 bp, Synthetic construct
  source 1..20: mol_type = other DNA
aacgactctgcgcgggaacc

SEQ ID NO: 1024 - DNA, 20 bp, Synthetic construct
  source 1..20: mol_type = other DNA
gggcacagcaagccaagctc

SEQ ID NO: 1025 - DNA, 20 bp, Synthetic construct
  source 1..20: mol_type = other DNA
cccgaccttaggggttacag

SEQ ID NO: 1026 - DNA, 20 bp, Synthetic construct
  source 1..20: mol_type = other DNA
tctgcgcgggaaccaggagc

SEQ ID NO: 1027 - DNA, 20 bp, Synthetic construct
  source 1..20: mol_type = other DNA
gcttgctgtgcccagagctc

SEQ ID NO: 1028 - DNA, 20 bp, Synthetic construct
  source 1..20: mol_type = other DNA
cctctgtaacccctaaggtc

SEQ ID NO: 1029 - DNA, 20 bp, Synthetic construct
  source 1..20: mol_type = other DNA
ctgcgcgggaaccaggagcc

SEQ ID NO: 1030 - DNA, 20 bp, Synthetic construct
  source 1..20: mol_type = other DNA
gctggaaacgaggtgtttcc

SEQ ID NO: 1031 - DNA, 20 bp, Synthetic construct
  source 1..20: mol_type = other DNA
ggaaccaggagccgggaacc

SEQ ID NO: 1032 - DNA, 20 bp, Synthetic construct
  source 1..20: mol_type = other DNA
ttgcggggatgctggaaacg

SEQ ID NO: 1033 - DNA, 20 bp, Synthetic construct
  source 1..20: mol_type = other DNA
agctccgggttcccggctcc

SEQ ID NO: 1034 - RNA, 20 nt, Synthetic construct
  source 1..20: mol_type = other RNA
gagtgatcatatattagaag

SEQ ID NO: 1035 - RNA, 20 nt, Synthetic construct
  source 1..20: mol_type = other RNA
gtctctgcccatcctcctgg

SEQ ID NO: 1036 - RNA, 20 nt, Synthetic construct
  source 1..20: mol_type = other RNA
attatttagcatcactttgg

SEQ ID NO: 1037 - RNA, 20 nt, Synthetic construct
  source 1..20: mol_type = other RNA
gactacaagggtaccatatt

SEQ ID NO: 1038 - RNA, 20 nt, Synthetic construct
  source 1..20: mol_type = other RNA
tatgatctccagagaaattc

SEQ ID NO: 1039 - RNA, 20 nt, Synthetic construct
  source 1..20: mol_type = other RNA
tgtgggagtaggcatggtag

SEQ ID NO: 1040 - RNA, 20 nt, Synthetic construct
  source 1..20: mol_type = other RNA
cttgtcttgaggcatctggg

SEQ ID NO: 1041 - RNA, 20 nt, Synthetic construct
  source 1..20: mol_type = other RNA
atctgccaccttctgcagga

SEQ ID NO: 1042 - RNA, 20 nt, Synthetic construct
  source 1..20: mol_type = other RNA
ttgcacagaaagtctgttgg

SEQ ID NO: 1043 - RNA, 20 nt, Synthetic construct
  source 1..20: mol_type = other RNA
tgaaattaatttcagaggtg

SEQ ID NO: 1044 - RNA, 20 nt, Synthetic construct
  source 1..20: mol_type = other RNA
agggagtgtggtaaaattag

SEQ ID NO: 1045 - RNA, 20 nt, Synthetic construct
  source 1..20: mol_type = other RNA
tcaaggaggaagtctcagct

SEQ ID NO: 1046 - RNA, 20 nt, Synthetic construct
  source 1..20: mol_type = other RNA
ccaggaggatgggcagagac

SEQ ID NO: 1047 - RNA, 20 nt, Synthetic construct
  source 1..20: mol_type = other RNA
ttatttagcatcactttggc

SEQ ID NO: 1048 - RNA, 20 nt, Synthetic construct
  source 1..20: mol_type = other RNA
actacaagggtaccatattt

SEQ ID NO: 1049 - RNA, 20 nt, Synthetic construct
  source 1..20: mol_type = other RNA
atgatctccagagaaattca

SEQ ID NO: 1050 - RNA, 20 nt, Synthetic construct
  source 1..20: mol_type = other RNA
atctaagaagtccccagcag

SEQ ID NO: 1051 - RNA, 20 nt, Synthetic construct
  source 1..20: mol_type = other RNA
gtcttgaggcatctgggcgg

SEQ ID NO: 1052 - RNA, 20 nt, Synthetic construct
  source 1..20: mol_type = other RNA
caatatctgccaccttctgc

SEQ ID NO: 1053 - RNA, 20 nt, Synthetic construct
  source 1..20: mol_type = other RNA
gttgcacagaaagtctgttg

SEQ ID NO: 1054 - RNA, 20 nt, Synthetic construct
  source 1..20: mol_type = other RNA
gaaattaatttcagaggtgt

SEQ ID NO: 1055 - RNA, 20 nt, Synthetic construct
  source 1..20: mol_type = other RNA
gggagtgtggtaaaattaga

SEQ ID NO: 1056 - RNA, 20 nt, Synthetic construct
  source 1..20: mol_type = other RNA
acttcctccttgataccacc

SEQ ID NO: 1057 - RNA, 20 nt, Synthetic construct
  source 1..20: mol_type = other RNA
ccagtctctgcccatcctcc

SEQ ID NO: 1058 - RNA, 20 nt, Synthetic construct
  source 1..20: mol_type = other RNA
ccccaaaccatctgactaca

SEQ ID NO: 1059 - RNA, 20 nt, Synthetic construct
  source 1..20: mol_type = other RNA
aaagagtgttaacccaaata

SEQ ID NO: 1060 - RNA, 20 nt, Synthetic construct
  source 1..20: mol_type = other RNA
caaattgccctgaatttctc

SEQ ID NO: 1061 - RNA, 20 nt, Synthetic construct
  source 1..20: mol_type = other RNA
caagctgagagcctctgctg

SEQ ID NO: 1062 - RNA, 20 nt, Synthetic construct
  source 1..20: mol_type = other RNA
tcttgaggcatctgggcgga

SEQ ID NO: 1063 - RNA, 20 nt, Synthetic construct
  source 1..20: mol_type = other RNA
ctgcagaaggtggcagatat

SEQ ID NO: 1064 - RNA, 20 nt, Synthetic construct
  source 1..20: mol_type = other RNA
agttgcacagaaagtctgtt

SEQ ID NO: 1065 - RNA, 20 nt, Synthetic construct
  source 1..20: mol_type = other RNA
aaattaatttcagaggtgtg

SEQ ID NO: 1066 - RNA, 20 nt, Synthetic construct
  source 1..20: mol_type = other RNA
gaaacagaaatctgaccgct

SEQ ID NO: 1067 - RNA, 20 nt, Synthetic construct
  source 1..20: mol_type = other RNA
tcctccttgataccaccagg

SEQ ID NO: 1068 - RNA, 20 nt, Synthetic construct
  source 1..20: mol_type = other RNA
agacactaactttctcccta

SEQ ID NO: 1069 - RNA, 20 nt, Synthetic construct
  source 1..20: mol_type = other RNA
ccttgtagtcagatggtttg

SEQ ID NO: 1070 - RNA, 20 nt, Synthetic construct
  source 1..20: mol_type = other RNA
tatttgggttaacactcttt

SEQ ID NO: 1071 - RNA, 20 nt, Synthetic construct
  source 1..20: mol_type = other RNA
cagagaaattcagggcaatt

SEQ ID NO: 1072 - RNA, 20 nt, Synthetic construct
  source 1..20: mol_type = other RNA
acaagctgagagcctctgct

SEQ ID NO: 1073 - RNA, 20 nt, Synthetic construct
  source 1..20: mol_type = other RNA
tgggcggagggctatgatac

SEQ ID NO: 1074 - RNA, 20 nt, Synthetic construct
  source 1..20: mol_type = other RNA
aggtggcagatattggcagc

SEQ ID NO: 1075 - RNA, 20 nt, Synthetic construct
  source 1..20: mol_type = other RNA
aagttgcacagaaagtctgt

SEQ ID NO: 1076 - RNA, 20 nt, Synthetic construct
  source 1..20: mol_type = other RNA
ttaatttcagaggtgtgggg

SEQ ID NO: 1077 - RNA, 20 nt, Synthetic construct
  source 1..20: mol_type = other RNA
aaacagaaatctgaccgctt

SEQ ID NO: 1078 - RNA, 20 nt, Synthetic construct
  source 1..20: mol_type = other RNA
tcctcctggtggtatcaagg

SEQ ID NO: 1079 - RNA, 20 nt, Synthetic construct
  source 1..20: mol_type = other RNA
gacactaactttctccctat

SEQ ID NO: 1080 - RNA, 20 nt, Synthetic construct
  source 1..20: mol_type = other RNA
cccaaaccatctgactacaa

SEQ ID NO: 1081 - RNA, 20 nt, Synthetic construct
  source 1..20: mol_type = other RNA
tgtcttgggatgaaaatgac

SEQ ID NO: 1082 - RNA, 20 nt, Synthetic construct
  source 1..20: mol_type = other RNA
aaattcagggcaatttggtg

SEQ ID NO: 1083 - RNA, 20 nt, Synthetic construct
  source 1..20: mol_type = other RNA
gacaagctgagagcctctgc

SEQ ID NO: 1084 - RNA, 20 nt, Synthetic construct
  source 1..20: mol_type = other RNA
tactggccccatcctgcaga

SEQ ID NO: 1085 - RNA, 20 nt, Synthetic construct
  source 1..20: mol_type = other RNA
attggcagctggcaccagtg

SEQ ID NO: 1086 - RNA, 20 nt, Synthetic construct
  source 1..20: mol_type = other RNA
accaaattcagtccacagta

SEQ ID NO: 1087 - RNA, 20 nt, Synthetic construct
  source 1..20: mol_type = other RNA
taatttcagaggtgtgggga

SEQ ID NO: 1088 - RNA, 20 nt, Synthetic construct
  source 1..20: mol_type = other RNA
aacagaaatctgaccgcttg

SEQ ID NO: 1089 - RNA, 20 nt, Synthetic construct
  source 1..20: mol_type = other RNA
ccatcctcctggtggtatca

SEQ ID NO: 1090 - RNA, 20 nt, Synthetic construct
  source 1..20: mol_type = other RNA
aaataatactgactcccata

SEQ ID NO: 1091 - RNA, 20 nt, Synthetic construct
  source 1..20: mol_type = other RNA
cccttgtagtcagatggttt

SEQ ID NO: 1092 - RNA, 20 nt, Synthetic construct
  source 1..20: mol_type = other RNA
cttgggatgaaaatgacagg

SEQ ID NO: 1093 - RNA, 20 nt, Synthetic construct
  source 1..20: mol_type = other RNA
aattcagggcaatttggtgt

SEQ ID NO: 1094 - RNA, 20 nt, Synthetic construct
  source 1..20: mol_type = other RNA
gaggctctcagcttgtcttg

SEQ ID NO: 1095 - RNA, 20 nt, Synthetic construct
  source 1..20: mol_type = other RNA
tggccccatcctgcagaagg

SEQ ID NO: 1096 - RNA, 20 nt, Synthetic construct
  source 1..20: mol_type = other RNA
tgatcacaatggaaccgcac

SEQ ID NO: 1097 - RNA, 20 nt, Synthetic construct
  source 1..20: mol_type = other RNA
tccttactgtggactgaatt

SEQ ID NO: 1098 - RNA, 20 nt, Synthetic construct
  source 1..20: mol_type = other RNA
agaggtgtggggagggctta

SEQ ID NO: 1099 - RNA, 20 nt, Synthetic construct
  source 1..20: mol_type = other RNA
accgcttggggccaccttgc

SEQ ID NO: 1100 - RNA, 20 nt, Synthetic construct
  source 1..20: mol_type = other RNA
ccttgataccaccaggagga

SEQ ID NO: 1101 - RNA, 20 nt, Synthetic construct
  source 1..20: mol_type = other RNA
taaataatactgactcccat

SEQ ID NO: 1102 - RNA, 20 nt, Synthetic construct
  source 1..20: mol_type = other RNA
acccttgtagtcagatggtt

SEQ ID NO: 1103 - RNA, 20 nt, Synthetic construct
  source 1..20: mol_type = other RNA
ttgggatgaaaatgacaggt

SEQ ID NO: 1104 - RNA, 20 nt, Synthetic construct
  source 1..20: mol_type = other RNA
gggcaatttggtgtgggagt

SEQ ID NO: 1105 - RNA, 20 nt, Synthetic construct
  source 1..20: mol_type = other RNA
tcagcttgtcttgaggcatc

SEQ ID NO: 1106 - RNA, 20 nt, Synthetic construct
  source 1..20: mol_type = other RNA
ctgccaccttctgcaggatg

SEQ ID NO: 1107 - RNA, 20 nt, Synthetic construct
  source 1..20: mol_type = other RNA
ttcagaaatgatgatcacaa

SEQ ID NO: 1108 - RNA, 20 nt, Synthetic construct
  source 1..20: mol_type = other RNA
ttaatttcacttccttactg

SEQ ID NO: 1109 - RNA, 20 nt, Synthetic construct
  source 1..20: mol_type = other RNA
gaggtgtggggagggcttaa

SEQ ID NO: 1110 - RNA, 20 nt, Synthetic construct
  source 1..20: mol_type = other RNA
cttgataccaccaggaggat

SEQ ID NO: 1111 - RNA, 20 nt, Synthetic construct
  source 1..20: mol_type = other RNA
agtattatttagcatcactt

SEQ ID NO: 1112 - RNA, 20 nt, Synthetic construct
  source 1..20: mol_type = other RNA
atggtacccttgtagtcaga

SEQ ID NO: 1113 - RNA, 20 nt, Synthetic construct
  source 1..20: mol_type = other RNA
atttctctggagatcataag

SEQ ID NO: 1114 - RNA, 20 nt, Synthetic construct
  source 1..20: mol_type = other RNA
atttggtgtgggagtaggca

SEQ ID NO: 1115 - RNA, 20 nt, Synthetic construct
  source 1..20: mol_type = other RNA
cagcttgtcttgaggcatct

SEQ ID NO: 1116 - RNA, 20 nt, Synthetic construct
  source 1..20: mol_type = other RNA
tctgccaccttctgcaggat

SEQ ID NO: 1117 - RNA, 20 nt, Synthetic construct
  source 1..20: mol_type = other RNA
tctgaacgtcagactgttga

SEQ ID NO: 1118 - RNA, 20 nt, Synthetic construct
  source 1..20: mol_type = other RNA
ggaagtgaaattaatttcag

SEQ ID NO: 1119 - RNA, 20 nt, Synthetic construct
  source 1..20: mol_type = other RNA
ggggagggcttaagggagtg

SEQ ID NO: 1120 - RNA, 20 nt, Synthetic construct
  source 1..20: mol_type = other RNA
ccctgcaaggtggccccaag

SEQ ID NO: 1121 - RNA, 20 nt, Synthetic construct
  source 1..20: mol_type = other RNA
tgcatgttggcttagcttgg

SEQ ID NO: 1122 - RNA, 19 nt, Synthetic construct
  source 1..19: mol_type = other RNA
gaggctgtgtgcttctgag

SEQ ID NO: 1123 - RNA, 20 nt, Synthetic construct
  source 1..20: mol_type = other RNA
ggcatccttggggaagctga

SEQ ID NO: 1124 - RNA, 20 nt, Synthetic construct
  source 1..20: mol_type = other RNA
aggcagcagctcccggagtc

SEQ ID NO: 1125 - RNA, 20 nt, Synthetic construct
  source 1..20: mol_type = other RNA
tgcctggctccacgccctgc

SEQ ID NO: 1126 - RNA, 20 nt, Synthetic construct
  source 1..20: mol_type = other RNA
gtcagagccccaaggtaaaa

SEQ ID NO: 1127 - RNA, 20 nt, Synthetic construct
  source 1..20: mol_type = other RNA
acagagaaaccattctgaat

SEQ ID NO: 1128 - RNA, 20 nt, Synthetic construct
  source 1..20: mol_type = other RNA
ctgaattggggatgggggtg

SEQ ID NO: 1129 - RNA, 20 nt, Synthetic construct
  source 1..20: mol_type = other RNA
gtcctgctggggcaggccat

SEQ ID NO: 1130 - RNA, 20 nt, Synthetic construct
  source 1..20: mol_type = other RNA
gacctgaagtctccctccgg

SEQ ID NO: 1131 - RNA, 20 nt, Synthetic construct
  source 1..20: mol_type = other RNA
ccgcttggggccaccttgca

SEQ ID NO: 1132 - RNA, 20 nt, Synthetic construct
  source 1..20: mol_type = other RNA
gcatgttggcttagcttggc

SEQ ID NO: 1133 - RNA, 20 nt, Synthetic construct
  source 1..20: mol_type = other RNA
aggctgtgtgcttctgagct

SEQ ID NO: 1134 - RNA, 20 nt, Synthetic construct
  source 1..20: mol_type = other RNA
tcgtgccctcagcttcccca

SEQ ID NO: 1135 - RNA, 20 nt, Synthetic construct
  source 1..20: mol_type = other RNA
agactccgggagctgctgcc

SEQ ID NO: 1136 - RNA, 20 nt, Synthetic construct
  source 1..20: mol_type = other RNA
gcctggctccacgccctgct

SEQ ID NO: 1137 - RNA, 20 nt, Synthetic construct
  source 1..20: mol_type = other RNA
gagccccaaggtaaaaaggc

SEQ ID NO: 1138 - RNA, 20 nt, Synthetic construct
  source 1..20: mol_type = other RNA
cagagaaaccattctgaatt

SEQ ID NO: 1139 - RNA, 20 nt, Synthetic construct
  source 1..20: mol_type = other RNA
attggggatgggggtgagga

SEQ ID NO: 1140 - RNA, 20 nt, Synthetic construct
  source 1..20: mol_type = other RNA
ttccaatggcctgccccagc

SEQ ID NO: 1141 - RNA, 20 nt, Synthetic construct
  source 1..20: mol_type = other RNA
gctgacctgaagtctccctc

SEQ ID NO: 1142 - RNA, 20 nt, Synthetic construct
  source 1..20: mol_type = other RNA
aaaaaactctccctgcaagg

SEQ ID NO: 1143 - RNA, 20 nt, Synthetic construct
  source 1..20: mol_type = other RNA
tagcttggcgggctcccaac

SEQ ID NO: 1144 - RNA, 20 nt, Synthetic construct
  source 1..20: mol_type = other RNA
cttctgagctgggcatccga

SEQ ID NO: 1145 - RNA, 20 nt, Synthetic construct
  source 1..20: mol_type = other RNA
ttggggaagctgagggcacg

SEQ ID NO: 1146 - RNA, 20 nt, Synthetic construct
  source 1..20: mol_type = other RNA
tccgggagctgctgcctggc

SEQ ID NO: 1147 - RNA, 20 nt, Synthetic construct
  source 1..20: mol_type = other RNA
acccagcagggcgtggagcc

SEQ ID NO: 1148 - RNA, 20 nt, Synthetic construct
  source 1..20: mol_type = other RNA
agccccaaggtaaaaaggcc

SEQ ID NO: 1149 - RNA, 20 nt, Synthetic construct
  source 1..20: mol_type = other RNA
agagaaaccattctgaattg

SEQ ID NO: 1150 - RNA, 20 nt, Synthetic construct
  source 1..20: mol_type = other RNA
ttggggatgggggtgaggat

SEQ ID NO: 1151 - RNA, 20 nt, Synthetic construct
  source 1..20: mol_type = other RNA
aactctttcacatcttccaa

SEQ ID NO: 1152 - RNA, 20 nt, Synthetic construct
  source 1..20: mol_type = other RNA
agggagacttcaggtcagcc

SEQ ID NO: 1153 - RNA, 20 nt, Synthetic construct
  source 1..20: mol_type = other RNA
tcaaaaaaactctccctgca

SEQ ID NO: 1154 - RNA, 20 nt, Synthetic construct
  source 1..20: mol_type = other RNA
gcgggctcccaactggtgac

SEQ ID NO: 1155 - RNA, 20 nt, Synthetic construct
  source 1..20: mol_type = other RNA
tgggcatccgaaggcatcct

SEQ ID NO: 1156 - RNA, 20 nt, Synthetic construct
  source 1..20: mol_type = other RNA
gggaagctgagggcacgagg

SEQ ID NO: 1157 - RNA, 20 nt, Synthetic construct
  source 1..20: mol_type = other RNA
cccagccaggcagcagctcc

SEQ ID NO: 1158 - RNA, 20 nt, Synthetic construct
  source 1..20: mol_type = other RNA
aggtaggacccagcagggcg

SEQ ID NO: 1159 - RNA, 20 nt, Synthetic construct
  source 1..20: mol_type = other RNA
gctaaattaagatgctttcc

SEQ ID NO: 1160 - RNA, 20 nt, Synthetic construct
  source 1..20: mol_type = other RNA
aaaccattctgaattgggga

SEQ ID NO: 1161 - RNA, 20 nt, Synthetic construct
  source 1..20: mol_type = other RNA
atgggggtgaggatgggaac

SEQ ID NO: 1162 - RNA, 20 nt, Synthetic construct
  source 1..20: mol_type = other RNA
agttgtctatttccttccac

SEQ ID NO: 1163 - RNA, 20 nt, Synthetic construct
  source 1..20: mol_type = other RNA
cttcaggtcagccaggtgtc

SEQ ID NO: 1164 - RNA, 20 nt, Synthetic construct
  source 1..20: mol_type = other RNA
acatgcaaagaaacaagtga

SEQ ID NO: 1165 - RNA, 20 nt, Synthetic construct
  source 1..20: mol_type = other RNA
tcactaaccagtcaccagtt

SEQ ID NO: 1166 - RNA, 20 nt, Synthetic construct
  source 1..20: mol_type = other RNA
gggcatccgaaggcatcctt

SEQ ID NO: 1167 - RNA, 20 nt, Synthetic construct
  source 1..20: mol_type = other RNA
ggaagctgagggcacgagga

SEQ ID NO: 1168 - RNA, 20 nt, Synthetic construct
  source 1..20: mol_type = other RNA
ccgggagctgctgcctggct

SEQ ID NO: 1169 - RNA, 20 nt, Synthetic construct
  source 1..20: mol_type = other RNA
ctgacaggtaggacccagca

SEQ ID NO: 1170 - RNA, 20 nt, Synthetic construct
  source 1..20: mol_type = other RNA
atttagcgtgcagtctcagc

SEQ ID NO: 1171 - RNA, 20 nt, Synthetic construct
  source 1..20: mol_type = other RNA
aaccattctgaattggggat

SEQ ID NO: 1172 - RNA, 20 nt, Synthetic construct
  source 1..20: mol_type = other RNA
aacaggagtctgtgtcctgc

SEQ ID NO: 1173 - RNA, 20 nt, Synthetic construct
  source 1..20: mol_type = other RNA
tgtctatttccttccaccgg

SEQ ID NO: 1174 - RNA, 20 nt, Synthetic construct
  source 1..20: mol_type = other RNA
tggttcatactccagacacc

SEQ ID NO: 1175 - RNA, 20 nt, Synthetic construct
  source 1..20: mol_type = other RNA
aacatgcaaagaaacaagtg

SEQ ID NO: 1176 - RNA, 20 nt, Synthetic construct
  source 1..20: mol_type = other RNA
atcactaaccagtcaccagt

SEQ ID NO: 1177 - RNA, 20 nt, Synthetic construct
  source 1..20: mol_type = other RNA
ggcatccgaaggcatccttg

SEQ ID NO: 1178 - RNA, 20 nt, Synthetic construct
  source 1..20: mol_type = other RNA
gaagctgagggcacgaggag

SEQ ID NO: 1179 - RNA, 20 nt, Synthetic construct
  source 1..20: mol_type = other RNA
attgtgtaggaatcccagcc

SEQ ID NO: 1180 - RNA, 20 nt, Synthetic construct
  source 1..20: mol_type = other RNA
tctgacaggtaggacccagc

SEQ ID NO: 1181 - RNA, 20 nt, Synthetic construct
  source 1..20: mol_type = other RNA
ctctgtttatctggaatggc

SEQ ID NO: 1182 - RNA, 20 nt, Synthetic construct
  source 1..20: mol_type = other RNA
accattctgaattggggatg

SEQ ID NO: 1183 - RNA, 20 nt, Synthetic construct
  source 1..20: mol_type = other RNA
acaggagtctgtgtcctgct

SEQ ID NO: 1184 - RNA, 20 nt, Synthetic construct
  source 1..20: mol_type = other RNA
gtctatttccttccaccgga

SEQ ID NO: 1185 - RNA, 20 nt, Synthetic construct
  source 1..20: mol_type = other RNA
aaccatgtatcagcaccgaa

SEQ ID NO: 1186 - RNA, 20 nt, Synthetic construct
  source 1..20: mol_type = other RNA
tcacttgtttctttgcatgt

SEQ ID NO: 1187 - RNA, 20 nt, Synthetic construct
  source 1..20: mol_type = other RNA
ctggtgactggttagtgatg

SEQ ID NO: 1188 - RNA, 20 nt, Synthetic construct
  source 1..20: mol_type = other RNA
agcttccccaaggatgcctt

SEQ ID NO: 1189 - RNA, 20 nt, Synthetic construct
  source 1..20: mol_type = other RNA
gaggaggggctgccagactc

SEQ ID NO: 1190 - RNA, 20 nt, Synthetic construct
  source 1..20: mol_type = other RNA
ttcctacacaatgcgttgcc

SEQ ID NO: 1191 - RNA, 20 nt, Synthetic construct
  source 1..20: mol_type = other RNA
tcctacctgtcagagcccca

SEQ ID NO: 1192 - RNA, 20 nt, Synthetic construct
  source 1..20: mol_type = other RNA
gtttctctgtttatctggaa

SEQ ID NO: 1193 - RNA, 20 nt, Synthetic construct
  source 1..20: mol_type = other RNA
ccattctgaattggggatgg

SEQ ID NO: 1194 - RNA, 20 nt, Synthetic construct
  source 1..20: mol_type = other RNA
caggagtctgtgtcctgctg

SEQ ID NO: 1195 - RNA, 20 nt, Synthetic construct
  source 1..20: mol_type = other RNA
tgaagtctccctccggtgga

SEQ ID NO: 1196 - RNA, 20 nt, Synthetic construct
  source 1..20: mol_type = other RNA
ctttgcatgttggcttagct

SEQ ID NO: 1197 - RNA, 20 nt, Synthetic construct
  source 1..20: mol_type = other RNA
tagtgatgaggctagtgatg

SEQ ID NO: 1198 - RNA, 20 nt, Synthetic construct
  source 1..20: mol_type = other RNA
aggcatccttggggaagctg

SEQ ID NO: 1199 - RNA, 20 nt, Synthetic construct
  source 1..20: mol_type = other RNA
aggaggggctgccagactcc

SEQ ID NO: 1200 - RNA, 20 nt, Synthetic construct
  source 1..20: mol_type = other RNA
agccaggcaacgcattgtgt

SEQ ID NO: 1201 - RNA, 20 nt, Synthetic construct
  source 1..20: mol_type = other RNA
accttggggctctgacaggt

SEQ ID NO: 1202 - RNA, 20 nt, Synthetic construct
  source 1..20: mol_type = other RNA
gaatggtttctctgtttatc

SEQ ID NO: 1203 - RNA, 20 nt, Synthetic construct
  source 1..20: mol_type = other RNA
cccccatccccaattcagaa

SEQ ID NO: 1204 - RNA, 20 nt, Synthetic construct
  source 1..20: mol_type = other RNA
agtctgtgtcctgctggggc

SEQ ID NO: 1205 - RNA, 20 nt, Synthetic construct
  source 1..20: mol_type = other RNA
ttccaccggagggagacttc

SEQ ID NO: 1206 - RNA, 20 nt, Synthetic construct
  source 1..20: mol_type = other RNA
aacctttcggtgctgataca

SEQ ID NO: 1207 - RNA, 20 nt, Synthetic construct
  source 1..20: mol_type = other RNA
accttgctgtgggccgagcc

SEQ ID NO: 1208 - RNA, 20 nt, Synthetic construct
  source 1..20: mol_type = other RNA
cccctcagtatttacccaaa

SEQ ID NO: 1209 - RNA, 20 nt, Synthetic construct
  source 1..20: mol_type = other RNA
tctgggtatggagtggagtc

SEQ ID NO: 1210 - RNA, 20 nt, Synthetic construct
  source 1..20: mol_type = other RNA
caaaattggagtcagccttg

SEQ ID NO: 1211 - RNA, 20 nt, Synthetic construct
  source 1..20: mol_type = other RNA
cagcagctggggagagctgg

SEQ ID NO: 1212 - RNA, 20 nt, Synthetic construct
  source 1..20: mol_type = other RNA
aaacaacaccattaggaaac

SEQ ID NO: 1213 - RNA, 20 nt, Synthetic construct
  source 1..20: mol_type = other RNA
ttaaaaagggtcaggggacg

SEQ ID NO: 1214 - RNA, 20 nt, Synthetic construct
  source 1..20: mol_type = other RNA
ctgccttcagagccggtgcc

SEQ ID NO: 1215 - RNA, 20 nt, Synthetic construct
  source 1..20: mol_type = other RNA
gccgcggccccagagctggc

SEQ ID NO: 1216 - RNA, 20 nt, Synthetic construct
  source 1..20: mol_type = other RNA
gaggccaccagcagcgcgcg

SEQ ID NO: 1217 - RNA, 20 nt, Synthetic construct
  source 1..20: mol_type = other RNA
gtctgacttctagaaccttt

SEQ ID NO: 1218 - RNA, 20 nt, Synthetic construct
  source 1..20: mol_type = other RNA
aggcgagaagaccttgctgt

SEQ ID NO: 1219 - RNA, 20 nt, Synthetic construct
  source 1..20: mol_type = other RNA
ccctttgggtaaatactgag

SEQ ID NO: 1220 - RNA, 20 nt, Synthetic construct
  source 1..20: mol_type = other RNA
ctgcttctctgggtatggag

SEQ ID NO: 1221 - RNA, 20 nt, Synthetic construct
  source 1..20: mol_type = other RNA
ggctcaacagctacacctca

SEQ ID NO: 1222 - RNA, 20 nt, Synthetic construct
  source 1..20: mol_type = other RNA
ccattaggaaactgggggga

SEQ ID NO: 1223 - RNA, 20 nt, Synthetic construct
  source 1..20: mol_type = other RNA
cctaatggtgttgtttaaaa

SEQ ID NO: 1224 - RNA, 20 nt, Synthetic construct
  source 1..20: mol_type = other RNA
taaaaagggtcaggggacgg

SEQ ID NO: 1225 - RNA, 20 nt, Synthetic construct
  source 1..20: mol_type = other RNA
caccggctctgaaggcagca

SEQ ID NO: 1226 - RNA, 20 nt, Synthetic construct
  source 1..20: mol_type = other RNA
tcccgccagctctggggccg

SEQ ID NO: 1227 - RNA, 20 nt, Synthetic construct
  source 1..20: mol_type = other RNA
aggccaccagcagcgcgcgc

SEQ ID NO: 1228 - RNA, 20 nt, Synthetic construct
  source 1..20: mol_type = other RNA
ggttctagaagtcagacttt

SEQ ID NO: 1229 - RNA, 20 nt, Synthetic construct
  source 1..20: mol_type = other RNA
gaggcgagaagaccttgctg

SEQ ID NO: 1230 - RNA, 20 nt, Synthetic construct
  source 1..20: mol_type = other RNA
acccctcagtatttacccaa

SEQ ID NO: 1231 - RNA, 20 nt, Synthetic construct
  source 1..20: mol_type = other RNA
cactccatacccagagaagc

SEQ ID NO: 1232 - RNA, 20 nt, Synthetic construct
  source 1..20: mol_type = other RNA
gctgttgagccctcagcagc

SEQ ID NO: 1233 - RNA, 20 nt, Synthetic construct
  source 1..20: mol_type = other RNA
ccctccccccagtttcctaa

SEQ ID NO: 1234 - RNA, 20 nt, Synthetic construct
  source 1..20: mol_type = other RNA
ctaatggtgttgtttaaaaa

SEQ ID NO: 1235 - RNA, 20 nt, Synthetic construct
  source 1..20: mol_type = other RNA
tcaggggacgggggaacaga

SEQ ID NO: 1236 - RNA, 20 nt, Synthetic construct
  source 1..20: mol_type = other RNA
tgccatgctgccttcagagc

SEQ ID NO: 1237 - RNA, 20 nt, Synthetic construct
  source 1..20: mol_type = other RNA
gcggccccagagctggcggg

SEQ ID NO: 1238 - RNA, 20 nt, Synthetic construct
  source 1..20: mol_type = other RNA
gctcccgcgcgcgctgctgg

SEQ ID NO: 1239 - RNA, 20 nt, Synthetic construct
  source 1..20: mol_type = other RNA
gttctagaagtcagactttc

SEQ ID NO: 1240 - RNA, 20 nt, Synthetic construct
  source 1..20: mol_type = other RNA
aaggtcttctcgcctccctt

SEQ ID NO: 1241 - RNA, 20 nt, Synthetic construct
  source 1..20: mol_type = other RNA
atactgaggggtgcctctgc

SEQ ID NO: 1242 - RNA, 20 nt, Synthetic construct
  source 1..20: mol_type = other RNA
actccatacccagagaagca

SEQ ID NO: 1243 - RNA, 20 nt, Synthetic construct
  source 1..20: mol_type = other RNA
ctgttgagccctcagcagct

SEQ ID NO: 1244 - RNA, 20 nt, Synthetic construct
  source 1..20: mol_type = other RNA
accattaggaaactgggggg

SEQ ID NO: 1245 - RNA, 20 nt, Synthetic construct
  source 1..20: mol_type = other RNA
ggtgttgtttaaaaagggtc

SEQ ID NO: 1246 - RNA, 20 nt, Synthetic construct
  source 1..20: mol_type = other RNA
ggggacgggggaacagatgg

SEQ ID NO: 1247 - RNA, 20 nt, Synthetic construct
  source 1..20: mol_type = other RNA
cggggaggtaggatgaccag

SEQ ID NO: 1248 - RNA, 20 nt, Synthetic construct
  source 1..20: mol_type = other RNA
cggccccagagctggcggga

SEQ ID NO: 1249 - RNA, 20 nt, Synthetic construct
  source 1..20: mol_type = other RNA
cgcgggagcccggggaacag

SEQ ID NO: 1250 - RNA, 20 nt, Synthetic construct
  source 1..20: mol_type = other RNA
gtcactaactctcagcatgc

SEQ ID NO: 1251 - RNA, 20 nt, Synthetic construct
  source 1..20: mol_type = other RNA
aggtcttctcgcctcccttt

SEQ ID NO: 1252 - RNA, 20 nt, Synthetic construct
  source 1..20: mol_type = other RNA
tgaggggtgcctctgcagga

SEQ ID NO: 1253 - RNA, 20 nt, Synthetic construct
  source 1..20: mol_type = other RNA
tttccctgcttctctgggta

SEQ ID NO: 1254 - RNA, 20 nt, Synthetic construct
  source 1..20: mol_type = other RNA
tgttgagccctcagcagctg

SEQ ID NO: 1255 - RNA, 20 nt, Synthetic construct
  source 1..20: mol_type = other RNA
aacaccattaggaaactggg

SEQ ID NO: 1256 - RNA, 20 nt, Synthetic construct
  source 1..20: mol_type = other RNA
gtgttgtttaaaaagggtca

SEQ ID NO: 1257 - RNA, 20 nt, Synthetic construct
  source 1..20: mol_type = other RNA
gggacgggggaacagatggt

SEQ ID NO: 1258 - RNA, 20 nt, Synthetic construct
  source 1..20: mol_type = other RNA
gtctgtggcagctcgtccgc

SEQ ID NO: 1259 - RNA, 20 nt, Synthetic construct
  source 1..20: mol_type = other RNA
tctccctcccgccagctctg

SEQ ID NO: 1260 - RNA, 20 nt, Synthetic construct
  source 1..20: mol_type = other RNA
ggagcccggggaacagcggt

SEQ ID NO: 1261 - RNA, 20 nt, Synthetic construct
  source 1..20: mol_type = other RNA
taactctcagcatgctggcc

SEQ ID NO: 1262 - RNA, 20 nt, Synthetic construct
  source 1..20: mol_type = other RNA
ctcagtatttacccaaaggg

SEQ ID NO: 1263 - RNA, 20 nt, Synthetic construct
  source 1..20: mol_type = other RNA
gaggggtgcctctgcaggac

SEQ ID NO: 1264 - RNA, 20 nt, Synthetic construct
  source 1..20: mol_type = other RNA
tttggtttccctgcttctct

SEQ ID NO: 1265 - RNA, 20 nt, Synthetic construct
  source 1..20: mol_type = other RNA
cagctctccccagctgctga

SEQ ID NO: 1266 - RNA, 20 nt, Synthetic construct
  source 1..20: mol_type = other RNA
caacaccattaggaaactgg

SEQ ID NO: 1267 - RNA, 20 nt, Synthetic construct
  source 1..20: mol_type = other RNA
tgttgtttaaaaagggtcag

SEQ ID NO: 1268 - RNA, 20 nt, Synthetic construct
  source 1..20: mol_type = other RNA
aagagcacagtgcagacacc

SEQ ID NO: 1269 - RNA, 20 nt, Synthetic construct
  source 1..20: mol_type = other RNA
gagctgccacagacttgccg

SEQ ID NO: 1270 - RNA, 20 nt, Synthetic construct
  source 1..20: mol_type = other RNA
ctctccctcccgccagctct

SEQ ID NO: 1271 - RNA, 20 nt, Synthetic construct
  source 1..20: mol_type = other RNA
gtcacctaccgctgttcccc

SEQ ID NO: 1272 - RNA, 20 nt, Synthetic construct
  source 1..20: mol_type = other RNA
ctcagcatgctggcctggct

SEQ ID NO: 1273 - RNA, 20 nt, Synthetic construct
  source 1..20: mol_type = other RNA
ctccctttgggtaaatactg

SEQ ID NO: 1274 - RNA, 20 nt, Synthetic construct
  source 1..20: mol_type = other RNA
gcagaggtcccgtcctgcag

SEQ ID NO: 1275 - RNA, 20 nt, Synthetic construct
  source 1..20: mol_type = other RNA
agaagcagggaaaccaaaat

SEQ ID NO: 1276 - RNA, 20 nt, Synthetic construct
  source 1..20: mol_type = other RNA
ccagctctccccagctgctg

SEQ ID NO: 1277 - RNA, 20 nt, Synthetic construct
  source 1..20: mol_type = other RNA
acaacaccattaggaaactg

SEQ ID NO: 1278 - RNA, 20 nt, Synthetic construct
  source 1..20: mol_type = other RNA
gtttaaaaagggtcagggga

SEQ ID NO: 1279 - RNA, 20 nt, Synthetic construct
  source 1..20: mol_type = other RNA
acagtgcagacacctggcac

SEQ ID NO: 1280 - RNA, 20 nt, Synthetic construct
  source 1..20: mol_type = other RNA
acttgccgcggccccagagc

SEQ ID NO: 1281 - RNA, 20 nt, Synthetic construct
  source 1..20: mol_type = other RNA
ccagagctggcgggagggag

SEQ ID NO: 1282 - RNA, 20 nt, Synthetic construct
  source 1..20: mol_type = other RNA
gcctggctcggcccacagca

SEQ ID NO: 1283 - RNA, 20 nt, Synthetic construct
  source 1..20: mol_type = other RNA
tccctttgggtaaatactga

SEQ ID NO: 1284 - RNA, 20 nt, Synthetic construct
  source 1..20: mol_type = other RNA
tatggagtggagtctggcag

SEQ ID NO: 1285 - RNA, 20 nt, Synthetic construct
  source 1..20: mol_type = other RNA
ctcaaggctgactccaattt

SEQ ID NO: 1286 - RNA, 20 nt, Synthetic construct
  source 1..20: mol_type = other RNA
cctcagcagctggggagagc

SEQ ID NO: 1287 - RNA, 20 nt, Synthetic construct
  source 1..20: mol_type = other RNA
aacaacaccattaggaaact

SEQ ID NO: 1288 - RNA, 20 nt, Synthetic construct
  source 1..20: mol_type = other RNA
tttaaaaagggtcaggggac

SEQ ID NO: 1289 - RNA, 20 nt, Synthetic construct
  source 1..20: mol_type = other RNA
acacctggcaccggctctga

SEQ ID NO: 1290 - RNA, 20 nt, Synthetic construct
  source 1..20: mol_type = other RNA
tgccgcggccccagagctgg

SEQ ID NO: 1291 - RNA, 20 nt, Synthetic construct
  source 1..20: mol_type = other RNA
cctctccctcccgccagctc

SEQ ID NO: 1292 - RNA, 20 nt, Synthetic construct
  source 1..20: mol_type = other RNA
ggtcacctaccgctgttccc

SEQ ID NO: 1293 - RNA, 20 nt, Synthetic construct
  source 1..20: mol_type = other RNA
cagagtcgttgcggggatgc

SEQ ID NO: 1294 - RNA, 20 nt, Synthetic construct
  source 1..20: mol_type = other RNA
ggagccgggaacccggagct

SEQ ID NO: 1295 - RNA, 20 nt, Synthetic construct
  source 1..20: mol_type = other RNA
aggggttacagaggagactt

SEQ ID NO: 1296 - RNA, 20 nt, Synthetic construct
  source 1..20: mol_type = other RNA
atccccgcaacgactctgcg

SEQ ID NO: 1297 - RNA, 20 nt, Synthetic construct
  source 1..20: mol_type = other RNA
caagccaagctccgggttcc

SEQ ID NO: 1298 - RNA, 20 nt, Synthetic construct
  source 1..20: mol_type = other RNA
agtctcctctgtaaccccta

SEQ ID NO: 1299 - RNA, 20 nt, Synthetic construct
  source 1..20: mol_type = other RNA
tccccgcaacgactctgcgc

SEQ ID NO: 1300 - RNA, 20 nt, Synthetic construct
  source 1..20: mol_type = other RNA
ggcacagcaagccaagctcc

SEQ ID NO: 1301 - RNA, 20 nt, Synthetic construct
  source 1..20: mol_type = other RNA
tcctctgtaacccctaaggt

SEQ ID NO: 1302 - RNA, 20 nt, Synthetic construct
  source 1..20: mol_type = other RNA
aacgactctgcgcgggaacc

SEQ ID NO: 1303 - RNA, 20 nt, Synthetic construct
  source 1..20: mol_type = other RNA
gggcacagcaagccaagctc

SEQ ID NO: 1304 - RNA, 20 nt, Synthetic construct
  source 1..20: mol_type = other RNA
cccgaccttaggggttacag

SEQ ID NO: 1305 - RNA, 20 nt, Synthetic construct
  source 1..20: mol_type = other RNA
tctgcgcgggaaccaggagc

SEQ ID NO: 1306 - RNA, 20 nt, Synthetic construct
  source 1..20: mol_type = other RNA
gcttgctgtgcccagagctc

SEQ ID NO: 1307 - RNA, 20 nt, Synthetic construct
  source 1..20: mol_type = other RNA
cctctgtaacccctaaggtc

SEQ ID NO: 1308 - RNA, 20 nt, Synthetic construct
  source 1..20: mol_type = other RNA
ctgcgcgggaaccaggagcc

SEQ ID NO: 1309 - RNA, 20 nt, Synthetic construct
  source 1..20: mol_type = other RNA
gctggaaacgaggtgtttcc

SEQ ID NO: 1310 - RNA, 20 nt, Synthetic construct
  source 1..20: mol_type = other RNA
ggaaccaggagccgggaacc

SEQ ID NO: 1311 - RNA, 20 nt, Synthetic construct
  source 1..20: mol_type = other RNA
ttgcggggatgctggaaacg

SEQ ID NO: 1312 - RNA, 20 nt, Synthetic construct
  source 1..20: mol_type = other RNA
agctccgggttcccggctcc

SEQ ID NO: 1313 - protein, 1001 aa, Synthetic construct
TCCAATGTCTTGGGATGAAAATGACAGGTGGGCCACTTATGATCTCCAGAGAAATTCAGGGCAATTTGGTGTGGGAGTAGGCATGGTAGAGGAGAGCAGCATCTAAGAAGTCCCCAGCAGAGGCTCTCAGCTTGTCTTGAGGCATCTGGGCGGAGGGCTATGATACTGGCCCCATCCTGCAGAAGGTGGCAGATATTGGCAGCTGGCACCAGTGCGGTTCCATTGTGATCATCATTTCTGAACGTCAGACTGTTGAAGGTTCCCCCAACAGACTTTCTGTGCAACTTTCTGTCTTCACCAAATTCAGTCCACAGTAAGGAAGTGAAATTAATTTCAGAGGTGTGGGGAGGGCTTAAGGGAGTGTGGTAAAATTAGAGGGTGTTCAGAAACAGAAATCTGACCGCTTGGGGCCACCTTGCAGGGAGAGTTTTTTTGATGATCCCTCACTTGTTTCTTTGCATGTTGGCTTAGCTTGGCGGGCTCCCAACTGGTGACTGGTTAGTGATGAGGCTAGTGATGAGGCTGTGTGCTTCTGAGCTGGGCATCCGAAGGCATCCTTGGGGAAGCTGAGGGCACGAGGAGGGGCTGCCAGACTCCGGGAGCTGCTGCCTGGCTGGGATTCCTACACAATGCGTTGCCTGGCTCCACGCCCTGCTGGGTCCTACCTGTCAGAGCCCCAAGGTAAAAAGGCCGGGAAAGCATCTTAATTTAGCGTGCAGTCTCAGCTGGTCCTGCCATTCCAGATAAACAGAGAAACCATTCTGAATTGGGGATGGGGGTGAGGATGGGAACAGGAGTCTGTGTCCTGCTGGGGCAGGCCATTGGAAGATGTGAAAGAGTTGTCTATTTCCTTCCACCGGAGGGAGACTTCAGGTCAGCCAGGTGTCTGGAGTATGAACCATGTATCAGCACCGAAAGGTTCTAGAAGTCAGACTTTCGGGCAGTGTGTCACTAACTCTCAGCATGCTGGCCTGGCTCGGCCCACAGCAAGGTCTTCTCGC

SEQ ID NO: 1314 - protein, 2001 aa, Synthetic construct
ATAGGGTGTCACTATGTTGCCCAGGCTAGCCTCCAACTCCCGGCTTCAAGCAATCCTCCTGCTTCGGCCTCCCAAAATGTTGGAATTACAGGCACAAGCCACCTGGCCCAGCCATCTACTTTATATTCAAATAAAACTTTACGTCCCATTATAAAGGGAAAAAATGGCAAAAACAGGAGGTAACCATTTAACAAGAAAGCAGAGTGATGTTAGATTATAGCAAGATACTGTTGACTGTAGAAGGCTCTGAGGCTAGAGAGCTGCTTTCTATAAAACAGAGTGATCATATATTAGAAGAGGTGTTAAAGACATGTTCACACCAAGCTGAGACTTCCTCCTTGATACCACCAGGAGGATGGGCAGAGACTGGAAAAGACACTAACTTTCTCCCTATGGGAGTCAGTATTATTTAGCATCACTTTGGCGGGTCACCCCAAACCATCTGACTACAAGGGTACCATATTTGGGTTAACACTCTTTTGGTATAATTTATGTTTTAGTCCAATGTCTTGGGATGAAAATGACAGGTGGGCCACTTATGATCTCCAGAGAAATTCAGGGCAATTTGGTGTGGGAGTAGGCATGGTAGAGGAGAGCAGCATCTAAGAAGTCCCCAGCAGAGGCTCTCAGCTTGTCTTGAGGCATCTGGGCGGAGGGCTATGATACTGGCCCCATCCTGCAGAAGGTGGCAGATATTGGCAGCTGGCACCAGTGCGGTTCCATTGTGATCATCATTTCTGAACGTCAGACTGTTGAAGGTTCCCCCAACAGACTTTCTGTGCAACTTTCTGTCTTCACCAAATTCAGTCCACAGTAAGGAAGTGAAATTAATTTCAGAGGTGTGGGGAGGGCTTAAGGGAGTGTGGTAAAATTAGAGGGTGTTCAGAAACAGAAATCTGACCGCTTGGGGCCACCTTGCAGGGAGAGTTTTTTTGATGATCCCTCACTTGTTTCTTTGCATGTTGGCTTAGCTTGGCGGGCTCCCAACTGGTGACTGGTTAGTGATGAGGCTAGTGATGAGGCTGTGTGCTTCTGAGCTGGGCATCCGAAGGCATCCTTGGGGAAGCTGAGGGCACGAGGAGGGGCTGCCAGACTCCGGGAGCTGCTGCCTGGCTGGGATTCCTACACAATGCGTTGCCTGGCTCCACGCCCTGCTGGGTCCTACCTGTCAGAGCCCCAAGGTAAAAAGGCCGGGAAAGCATCTTAATTTAGCGTGCAGTCTCAGCTGGTCCTGCCATTCCAGATAAACAGAGAAACCATTCTGAATTGGGGATGGGGGTGAGGATGGGAACAGGAGTCTGTGTCCTGCTGGGGCAGGCCATTGGAAGATGTGAAAGAGTTGTCTATTTCCTTCCACCGGAGGGAGACTTCAGGTCAGCCAGGTGTCTGGAGTATGAACCATGTATCAGCACCGAAAGGTTCTAGAAGTCAGACTTTCGGGCAGTGTGTCACTAACTCTCAGCATGCTGGCCTGGCTCGGCCCACAGCAAGGTCTTCTCGCCTCCCTTTGGGTAAATACTGAGGGGTGCCTCTGCAGGACGGGACCTCTGCCAGACTCCACTCCATACCCAGAGAAGCAGGGAAACCAAAATTGGAGTCAGCCTTGAGGTGTAGCTGTTGAGCCCTCAGCAGCTGGGGAGAGCTGGCGGATGCTGCCCTCCCCCCAGTTTCCTAATGGTGTTGTTTAAAAAGGGTCAGGGGACGGGGGAACAGATGGTGGGAAGAGCACAGTGCAGACACCTGGCACCGGCTCTGAAGGCAGCATGGCAGCTACACCGTTGGCTGGGAAGGGTGTGCCCCTGAAGAAGTCGTTTACATTCTCGAGTCAATTTTCCTGGAGTGTACAATGGACCTGTGGGAAAGCCTGTATGAAAGGGTAATGATGAGGGACCTAGCACAGTGTCCAATATTTTATAGGAACTGGAATTGAGCTCATAGGAGCTCAATTTTATTGGCATTGCTGTTGTTGGATGGTTAAAGGGGTGGTATCCCTTTTCTCAG

SEQ ID NO: 1315 - DNA, 20 bp, Synthetic construct
  source 1..20: mol_type = other DNA
agagaaaccattctgaattg

SEQ ID NO: 1316 - DNA, 20 bp, Synthetic construct
  source 1..20: mol_type = other DNA
agtctgtgtcctgctggggc

SEQ ID NO: 1317 - DNA, 20 bp, Synthetic construct
  source 1..20: mol_type = other DNA
gggcaatttggtgtgggagt

SEQ ID NO: 1318 - DNA, 20 bp, Synthetic construct
  source 1..20: mol_type = other DNA
cccgaccttaggggttacag

SEQ ID NO: 1319 - DNA, 20 bp, Synthetic construct
  source 1..20: mol_type = other DNA
tcttgaggcatctgggcgga

SEQ ID NO: 1320 - DNA, 20 bp, Synthetic construct
  source 1..20: mol_type = other DNA
ctgccaccttctgcaggatg

SEQ ID NO: 1321 - DNA, 20 bp, Synthetic construct
  source 1..20: mol_type = other DNA
gtcttgaggcatctgggcgg

SEQ ID NO: 1322 - DNA, 20 bp, Synthetic construct
  source 1..20: mol_type = other DNA
agccccaaggtaaaaaggcc

SEQ ID NO: 1323 - DNA, 20 bp, Synthetic construct
  source 1..20: mol_type = other DNA
cttgtcttgaggcatctggg

SEQ ID NO: 1324 - DNA, 20 bp, Synthetic construct
  source 1..20: mol_type = other DNA
tctgccaccttctgcaggat

SEQ ID NO: 1325 - DNA, 20 bp, Synthetic construct
  source 1..20: mol_type = other DNA
agttgcacagaaagtctgtt

SEQ ID NO: 1326 - DNA, 20 bp, Synthetic construct
  source 1..20: mol_type = other DNA
cctctgtaacccctaaggtc

SEQ ID NO: 1327 - DNA, 19 bp, Synthetic construct
  source 1..19: mol_type = other DNA
gaggctgtgtgcttctgag

SEQ ID NO: 1328 - DNA, 20 bp, Synthetic construct
  source 1..20: mol_type = other DNA
tgatcacaatggaaccgcac

SEQ ID NO: 1329 - DNA, 20 bp, Synthetic construct
  source 1..20: mol_type = other DNA
atctgccaccttctgcagga

SEQ ID NO: 1330 - DNA, 20 bp, Synthetic construct
  source 1..20: mol_type = other DNA
tgtgggagtaggcatggtag

SEQ ID NO: 1331 - DNA, 20 bp, Synthetic construct
  source 1..20: mol_type = other DNA
ggtcacctaccgctgttccc

SEQ ID NO: 1332 - DNA, 20 bp, Synthetic construct
  source 1..20: mol_type = other DNA
tgaagtctccctccggtgga

SEQ ID NO: 1333 - DNA, 20 bp, Synthetic construct
  source 1..20: mol_type = other DNA
tcctcctggtggtatcaagg

SEQ ID NO: 1334 - DNA, 20 bp, Synthetic construct
  source 1..20: mol_type = other DNA
ctgcagaaggtggcagatat

SEQ ID NO: 1335 - DNA, 20 bp, Synthetic construct
  source 1..20: mol_type = other DNA
gaggctctcagcttgtcttg

SEQ ID NO: 1336 - DNA, 20 bp, Synthetic construct
  source 1..20: mol_type = other DNA
acaagctgagagcctctgct

SEQ ID NO: 1337 - DNA, 20 bp, Synthetic construct
  source 1..20: mol_type = other DNA
ccatcctcctggtggtatca

SEQ ID NO: 1338 - DNA, 20 bp, Synthetic construct
  source 1..20: mol_type = other DNA
aagttgcacagaaagtctgt

SEQ ID NO: 1339 - DNA, 20 bp, Synthetic construct
  source 1..20: mol_type = other DNA
cagcttgtcttgaggcatct

SEQ ID NO: 1340 - DNA, 20 bp, Synthetic construct
  source 1..20: mol_type = other DNA
agaggtgtggggagggctta

SEQ ID NO: 1341 - DNA, 20 bp, Synthetic construct
  source 1..20: mol_type = other DNA
gtctctgcccatcctcctgg

SEQ ID NO: 1342 - DNA, 20 bp, Synthetic construct
  source 1..20: mol_type = other DNA
tgccatgctgccttcagagc

SEQ ID NO: 1343 - DNA, 20 bp, Synthetic construct
  source 1..20: mol_type = other DNA
agactccgggagctgctgcc

SEQ ID NO: 1344 - DNA, 20 bp, Synthetic construct
  source 1..20: mol_type = other DNA
gacaagctgagagcctctgc

SEQ ID NO: 1345 - DNA, 20 bp, Synthetic construct
  source 1..20: mol_type = other DNA
tgggcggagggctatgatac

SEQ ID NO: 1346 - DNA, 20 bp, Synthetic construct
  source 1..20: mol_type = other DNA
tcctctgtaacccctaaggt

SEQ ID NO: 1347 - DNA, 20 bp, Synthetic construct
  source 1..20: mol_type = other DNA
tcctccttgataccaccagg

SEQ ID NO: 1348 - DNA, 20 bp, Synthetic construct
  source 1..20: mol_type = other DNA
cggggaggtaggatgaccag

SEQ ID NO: 1349 - DNA, 20 bp, Synthetic construct
  source 1..20: mol_type = other DNA
acatgcaaagaaacaagtga

SEQ ID NO: 1350 - DNA, 20 bp, Synthetic construct
  source 1..20: mol_type = other DNA
acagtgcagacacctggcac

SEQ ID NO: 1351 - DNA, 20 bp, Synthetic construct
  source 1..20: mol_type = other DNA
aggtcttctcgcctcccttt

SEQ ID NO: 1352 - DNA, 20 bp, Synthetic construct
  source 1..20: mol_type = other DNA
caagccaagctccgggttcc

SEQ ID NO: 1353 - DNA, 20 bp, Synthetic construct
  source 1..20: mol_type = other DNA
ttaatttcacttccttactg

SEQ ID NO: 1354 - DNA, 20 bp, Synthetic construct
  source 1..20: mol_type = other DNA
tggccccatcctgcagaagg

SEQ ID NO: 1355 - DNA, 20 bp, Synthetic construct
  source 1..20: mol_type = other DNA
ctcagtatttacccaaaggg

SEQ ID NO: 1356 - DNA, 20 bp, Synthetic construct
  source 1..20: mol_type = other DNA
ggaaccaggagccgggaacc

SEQ ID NO: 1357 - DNA, 20 bp, Synthetic construct
  source 1..20: mol_type = other DNA
aaataatactgactcccata

SEQ ID NO: 1358 - DNA, 20 bp, Synthetic construct
  source 1..20: mol_type = other DNA
taaaaagggtcaggggacgg

SEQ ID NO: 1359 - DNA, 20 bp, Synthetic construct
  source 1..20: mol_type = other DNA
aggcatccttggggaagctg

SEQ ID NO: 1360 - DNA, 20 bp, Synthetic construct
  source 1..20: mol_type = other DNA
caccggctctgaaggcagca

SEQ ID NO: 1361 - DNA, 20 bp, Synthetic construct
  source 1..20: mol_type = other DNA
caagctgagagcctctgctg

SEQ ID NO: 1362 - DNA, 20 bp, Synthetic construct
  source 1..20: mol_type = other DNA
aaattcagggcaatttggtg

SEQ ID NO: 1363 - DNA, 20 bp, Synthetic construct
  source 1..20: mol_type = other DNA
tcaaaaaaactctccctgca

SEQ ID NO: 1364 - DNA, 20 bp, Synthetic construct
  source 1..20: mol_type = other DNA
tggttcatactccagacacc

SEQ ID NO: 1365 - DNA, 20 bp, Synthetic construct
  source 1..20: mol_type = other DNA
cttgataccaccaggaggat

SEQ ID NO: 1366 - DNA, 20 bp, Synthetic construct
  source 1..20: mol_type = other DNA
ggcacagcaagccaagctcc

SEQ ID NO: 1367 - DNA, 20 bp, Synthetic construct
  source 1..20: mol_type = other DNA
tcaaggaggaagtctcagct

SEQ ID NO: 1368 - DNA, 20 bp, Synthetic construct
  source 1..20: mol_type = other DNA
aaacagaaatctgaccgctt

SEQ ID NO: 1369 - DNA, 20 bp, Synthetic construct
  source 1..20: mol_type = other DNA
cggccccagagctggcggga

SEQ ID NO: 1370 - DNA, 20 bp, Synthetic construct
  source 1..20: mol_type = other DNA
atttggtgtgggagtaggca

SEQ ID NO: 1371 - DNA, 20 bp, Synthetic construct
  source 1..20: mol_type = other DNA
aggtggcagatattggcagc

SEQ ID NO: 1372 - DNA, 20 bp, Synthetic construct
  source 1..20: mol_type = other DNA
gggcacagcaagccaagctc

SEQ ID NO: 1373 - DNA, 20 bp, Synthetic construct
  source 1..20: mol_type = other DNA
agccaggcaacgcattgtgt

SEQ ID NO: 1374 - DNA, 20 bp, Synthetic construct
  source 1..20: mol_type = other DNA
gacactaactttctccctat

SEQ ID NO: 1375 - DNA, 20 bp, Synthetic construct
  source 1..20: mol_type = other DNA
accttggggctctgacaggt

SEQ ID NO: 1376 - DNA, 20 bp, Synthetic construct
  source 1..20: mol_type = other DNA
ttaatttcagaggtgtgggg

SEQ ID NO: 1377 - DNA, 20 bp, Synthetic construct
  source 1..20: mol_type = other DNA
tcagcttgtcttgaggcatc

SEQ ID NO: 1378 - DNA, 20 bp, Synthetic construct
  source 1..20: mol_type = other DNA
acttcctccttgataccacc

SEQ ID NO: 1379 - DNA, 20 bp, Synthetic construct
  source 1..20: mol_type = other DNA
ttccaccggagggagacttc

SEQ ID NO: 1380 - DNA, 20 bp, Synthetic construct
  source 1..20: mol_type = other DNA
ccagtctctgcccatcctcc

SEQ ID NO: 1381 - DNA, 20 bp, Synthetic construct
  source 1..20: mol_type = other DNA
cccaaaccatctgactacaa

SEQ ID NO: 1382 - DNA, 20 bp, Synthetic construct
  source 1..20: mol_type = other DNA
atttctctggagatcataag

SEQ ID NO: 1383 - DNA, 20 bp, Synthetic construct
  source 1..20: mol_type = other DNA
aggcagcagctcccggagtc

SEQ ID NO: 1384 - DNA, 20 bp, Synthetic construct
  source 1..20: mol_type = other DNA
tctgggtatggagtggagtc

SEQ ID NO: 1385 - DNA, 20 bp, Synthetic construct
  source 1..20: mol_type = other DNA
tcacttgtttctttgcatgt

SEQ ID NO: 1386 - DNA, 20 bp, Synthetic construct
  source 1..20: mol_type = other DNA
tctgcgcgggaaccaggagc

SEQ ID NO: 1387 - DNA, 20 bp, Synthetic construct
  source 1..20: mol_type = other DNA
gaaacagaaatctgaccgct

SEQ ID NO: 1388 - DNA, 20 bp, Synthetic construct
  source 1..20: mol_type = other DNA
atgatctccagagaaattca

SEQ ID NO: 1389 - DNA, 20 bp, Synthetic construct
  source 1..20: mol_type = other DNA
agctccgggttcccggctcc

SEQ ID NO: 1390 - DNA, 20 bp, Synthetic construct
  source 1..20: mol_type = other DNA
agggagacttcaggtcagcc

SEQ ID NO: 1391 - DNA, 20 bp, Synthetic construct
  source 1..20: mol_type = other DNA
ccttgataccaccaggagga

SEQ ID NO: 1392 - DNA, 20 bp, Synthetic construct
  source 1..20: mol_type = other DNA
gtcctgctggggcaggccat

SEQ ID NO: 1393 - DNA, 20 bp, Synthetic construct
  source 1..20: mol_type = other DNA
ggaagctgagggcacgagga

SEQ ID NO: 1394 - DNA, 20 bp, Synthetic construct
  source 1..20: mol_type = other DNA
ccaggaggatgggcagagac

SEQ ID NO: 1395 - DNA, 20 bp, Synthetic construct
  source 1..20: mol_type = other DNA
gactacaagggtaccatatt

SEQ ID NO: 1396 - DNA, 20 bp, Synthetic construct
  source 1..20: mol_type = other DNA
ggagcccggggaacagcggt

SEQ ID NO: 1397 - DNA, 20 bp, Synthetic construct
  source 1..20: mol_type = other DNA
acccagcagggcgtggagcc

SEQ ID NO: 1398 - DNA, 20 bp, Synthetic construct
  source 1..20: mol_type = other DNA
gagccccaaggtaaaaaggc

SEQ ID NO: 1399 - DNA, 20 bp, Synthetic construct
  source 1..20: mol_type = other DNA
acacctggcaccggctctga

SEQ ID NO: 1400 - DNA, 20 bp, Synthetic construct
  source 1..20: mol_type = other DNA
gtcagagccccaaggtaaaa

SEQ ID NO: 1401 - DNA, 20 bp, Synthetic construct
  source 1..20: mol_type = other DNA
acagagaaaccattctgaat

SEQ ID NO: 1402 - DNA, 20 bp, Synthetic construct
  source 1..20: mol_type = other DNA
tctccctcccgccagctctg

SEQ ID NO: 1403 - DNA, 20 bp, Synthetic construct
  source 1..20: mol_type = other DNA
cccagccaggcagcagctcc

SEQ ID NO: 1404 - DNA, 20 bp, Synthetic construct
  source 1..20: mol_type = other DNA
gctggaaacgaggtgtttcc

SEQ ID NO: 1405 - DNA, 20 bp, Synthetic construct
  source 1..20: mol_type = other DNA
ttgcggggatgctggaaacg

SEQ ID NO: 1406 - DNA, 20 bp, Synthetic construct
  source 1..20: mol_type = other DNA
ttgggatgaaaatgacaggt

SEQ ID NO: 1407 - DNA, 20 bp, Synthetic construct
  source 1..20: mol_type = other DNA
aggccaccagcagcgcgcgc

SEQ ID NO: 1408 - DNA, 20 bp, Synthetic construct
  source 1..20: mol_type = other DNA
taaataatactgactcccat

SEQ ID NO: 1409 - DNA, 20 bp, Synthetic construct
  source 1..20: mol_type = other DNA
gaggggtgcctctgcaggac

SEQ ID NO: 1410 - DNA, 20 bp, Synthetic construct
  source 1..20: mol_type = other DNA
atggtacccttgtagtcaga

SEQ ID NO: 1411 - DNA, 20 bp, Synthetic construct
  source 1..20: mol_type = other DNA
agacactaactttctcccta

SEQ ID NO: 1412 - DNA, 20 bp, Synthetic construct
  source 1..20: mol_type = other DNA
aagagcacagtgcagacacc

SEQ ID NO: 1413 - DNA, 20 bp, Synthetic construct
  source 1..20: mol_type = other DNA
tactggccccatcctgcaga

SEQ ID NO: 1414 - DNA, 20 bp, Synthetic construct
  source 1..20: mol_type = other DNA
tcccgccagctctggggccg

SEQ ID NO: 1415 - DNA, 20 bp, Synthetic construct
  source 1..20: mol_type = other DNA
ctctccctcccgccagctct

SEQ ID NO: 1416 - DNA, 20 bp, Synthetic construct
  source 1..20: mol_type = other DNA
gcttgctgtgcccagagctc

SEQ ID NO: 1417 - DNA, 20 bp, Synthetic construct
  source 1..20: mol_type = other DNA
tgtcttgggatgaaaatgac

SEQ ID NO: 1418 - DNA, 20 bp, Synthetic construct
  source 1..20: mol_type = other DNA
gcggccccagagctggcggg

SEQ ID NO: 1419 - DNA, 20 bp, Synthetic construct
  source 1..20: mol_type = other DNA
aacctttcggtgctgataca

SEQ ID NO: 1420 - DNA, 20 bp, Synthetic construct
  source 1..20: mol_type = other DNA
aaccatgtatcagcaccgaa

SEQ ID NO: 1421 - DNA, 20 bp, Synthetic construct
  source 1..20: mol_type = other DNA
aattcagggcaatttggtgt

SEQ ID NO: 1422 - DNA, 20 bp, Synthetic construct
  source 1..20: mol_type = other DNA
ccttgtagtcagatggtttg

SEQ ID NO: 1423 - DNA, 20 bp, Synthetic construct
  source 1..20: mol_type = other DNA
aacgactctgcgcgggaacc

SEQ ID NO: 1424 - DNA, 20 bp, Synthetic construct
  source 1..20: mol_type = other DNA
ccgggagctgctgcctggct

SEQ ID NO: 1425 - DNA, 20 bp, Synthetic construct
  source 1..20: mol_type = other DNA
agtattatttagcatcactt

SEQ ID NO: 1426 - DNA, 20 bp, Synthetic construct
  source 1..20: mol_type = other DNA
cgcgggagcccggggaacag

SEQ ID NO: 1427 - DNA, 20 bp, Synthetic construct
  source 1..20: mol_type = other DNA
caatatctgccaccttctgc

SEQ ID NO: 1428 - DNA, 20 bp, Synthetic construct
  source 1..20: mol_type = other DNA
acccttgtagtcagatggtt

SEQ ID NO: 1429 - DNA, 20 bp, Synthetic construct
  source 1..20: mol_type = other DNA
cctctccctcccgccagctc

SEQ ID NO: 1430 - DNA, 20 bp, Synthetic construct
  source 1..20: mol_type = other DNA
gagctgccacagacttgccg

SEQ ID NO: 1431 - DNA, 20 bp, Synthetic construct
  source 1..20: mol_type = other DNA
gaaattaatttcagaggtgt

SEQ ID NO: 1432 - DNA, 20 bp, Synthetic construct
  source 1..20: mol_type = other DNA
tgcctggctccacgccctgc

SEQ ID NO: 1433 - DNA, 20 bp, Synthetic construct
  source 1..20: mol_type = other DNA
gttctagaagtcagactttc

SEQ ID NO: 1434 - DNA, 20 bp, Synthetic construct
  source 1..20: mol_type = other DNA
cccttgtagtcagatggttt

SEQ ID NO: 1435 - DNA, 20 bp, Synthetic construct
  source 1..20: mol_type = other DNA
cagagtcgttgcggggatgc

SEQ ID NO: 1436 - DNA, 20 bp, Synthetic construct
  source 1..20: mol_type = other DNA
tatttgggttaacactcttt

SEQ ID NO: 1437 - DNA, 20 bp, Synthetic construct
  source 1..20: mol_type = other DNA
acaacaccattaggaaactg

SEQ ID NO: 1438 - DNA, 20 bp, Synthetic construct
  source 1..20: mol_type = other DNA
tgccgcggccccagagctgg

SEQ ID NO: 1439 - DNA, 20 bp, Synthetic construct
  source 1..20: mol_type = other DNA
ctgcgcgggaaccaggagcc

SEQ ID NO: 1440 - DNA, 20 bp, Synthetic construct
  source 1..20: mol_type = other DNA
ggagccgggaacccggagct

SEQ ID NO: 1441 - DNA, 20 bp, Synthetic construct
  source 1..20: mol_type = other DNA
tgttgtttaaaaagggtcag

SEQ ID NO: 1442 - DNA, 20 bp, Synthetic construct
  source 1..20: mol_type = other DNA
atccccgcaacgactctgcg

SEQ ID NO: 1443 - DNA, 20 bp, Synthetic construct
  source 1..20: mol_type = other DNA
tatggagtggagtctggcag

SEQ ID NO: 1444 - DNA, 20 bp, Synthetic construct
  source 1..20: mol_type = other DNA
cccccatccccaattcagaa

SEQ ID NO: 1445 - DNA, 20 bp, Synthetic construct
  source 1..20: mol_type = other DNA
cttgggatgaaaatgacagg

SEQ ID NO: 1446 - DNA, 20 bp, Synthetic construct
  source 1..20: mol_type = other DNA
gagtgatcatatattagaag

SEQ ID NO: 1447 - DNA, 20 bp, Synthetic construct
  source 1..20: mol_type = other DNA
gcctggctcggcccacagca

SEQ ID NO: 1448 - DNA, 20 bp, Synthetic construct
  source 1..20: mol_type = other DNA
aaccattctgaattggggat

SEQ ID NO: 1449 - DNA, 20 bp, Synthetic construct
  source 1..20: mol_type = other DNA
gtttaaaaagggtcagggga

SEQ ID NO: 1450 - DNA, 20 bp, Synthetic construct
  source 1..20: mol_type = other DNA
ctgaattggggatgggggtg

SEQ ID NO: 1451 - DNA, 20 bp, Synthetic construct
  source 1..20: mol_type = other DNA
aaaaaactctccctgcaagg

SEQ ID NO: 1452 - DNA, 20 bp, Synthetic construct
  source 1..20: mol_type = other DNA
gaggccaccagcagcgcgcg

SEQ ID NO: 1453 - DNA, 20 bp, Synthetic construct
  source 1..20: mol_type = other DNA
gtgttgtttaaaaagggtca

SEQ ID NO: 1454 - DNA, 20 bp, Synthetic construct
  source 1..20: mol_type = other DNA
cagcagctggggagagctgg

SEQ ID NO: 1455 - DNA, 20 bp, Synthetic construct
  source 1..20: mol_type = other DNA
gcagaggtcccgtcctgcag

SEQ ID NO: 1456 - DNA, 20 bp, Synthetic construct
  source 1..20: mol_type = other DNA
aaagagtgttaacccaaata

SEQ ID NO: 1457 - DNA, 20 bp, Synthetic construct
  source 1..20: mol_type = other DNA
acttgccgcggccccagagc

SEQ ID NO: 1458 - DNA, 20 bp, Synthetic construct
  source 1..20: mol_type = other DNA
gtctgacttctagaaccttt

SEQ ID NO: 1459 - DNA, 20 bp, Synthetic construct
  source 1..20: mol_type = other DNA
actacaagggtaccatattt

SEQ ID NO: 1460 - DNA, 20 bp, Synthetic construct
  source 1..20: mol_type = other DNA
attatttagcatcactttgg

SEQ ID NO: 1461 - DNA, 20 bp, Synthetic construct
  source 1..20: mol_type = other DNA
ccccaaaccatctgactaca

SEQ ID NO: 1462 - DNA, 20 bp, Synthetic construct
  source 1..20: mol_type = other DNA
gtcacctaccgctgttcccc

SEQ ID NO: 1463 - DNA, 20 bp, Synthetic construct
  source 1..20: mol_type = other DNA
ctccctttgggtaaatactg

SEQ ID NO: 1464 - DNA, 20 bp, Synthetic construct
  source 1..20: mol_type = other DNA
taatttcagaggtgtgggga

SEQ ID NO: 1465 - DNA, 20 bp, Synthetic construct
  source 1..20: mol_type = other DNA
tccccgcaacgactctgcgc

SEQ ID NO: 1466 - DNA, 20 bp, Synthetic construct
  source 1..20: mol_type = other DNA
agaagcagggaaaccaaaat

SEQ ID NO: 1467 - DNA, 20 bp, Synthetic construct
  source 1..20: mol_type = other DNA
ggttctagaagtcagacttt

SEQ ID NO: 1468 - DNA, 20 bp, Synthetic construct
  source 1..20: mol_type = other DNA
gtctgtggcagctcgtccgc

SEQ ID NO: 1469 - DNA, 20 bp, Synthetic construct
  source 1..20: mol_type = other DNA
cagagaaattcagggcaatt

SEQ ID NO: 1470 - DNA, 20 bp, Synthetic construct
  source 1..20: mol_type = other DNA
tgaaattaatttcagaggtg

SEQ ID NO: 1471 - DNA, 20 bp, Synthetic construct
  source 1..20: mol_type = other DNA
ttatttagcatcactttggc

SEQ ID NO: 1472 - DNA, 20 bp, Synthetic construct
  source 1..20: mol_type = other DNA
caacaccattaggaaactgg

SEQ ID NO: 1473 - DNA, 20 bp, Synthetic construct
  source 1..20: mol_type = other DNA
ctcagcatgctggcctggct

SEQ ID NO: 1474 - DNA, 20 bp, Synthetic construct
  source 1..20: mol_type = other DNA
aacagaaatctgaccgcttg

SEQ ID NO: 1475 - DNA, 20 bp, Synthetic construct
  source 1..20: mol_type = other DNA
aaacaacaccattaggaaac

SEQ ID NO: 1476 - DNA, 20 bp, Synthetic construct
  source 1..20: mol_type = other DNA
ctcaaggctgactccaattt

SEQ ID NO: 1477 - DNA, 20 bp, Synthetic construct
  source 1..20: mol_type = other DNA
ccagctctccccagctgctg

SEQ ID NO: 1478 - DNA, 20 bp, Synthetic construct
  source 1..20: mol_type = other DNA
tatgatctccagagaaattc

SEQ ID NO: 1479 - DNA, 20 bp, Synthetic construct
  source 1..20: mol_type = other DNA
caaattgccctgaatttctc

SEQ ID NO: 1480 - DNA, 20 bp, Synthetic construct
  source 1..20: mol_type = other DNA
gggacgggggaacagatggt

SEQ ID NO: 1481 - DNA, 20 bp, Synthetic construct
  source 1..20: mol_type = other DNA
aacaacaccattaggaaact

SEQ ID NO: 1482 - DNA, 20 bp, Synthetic construct
  source 1..20: mol_type = other DNA
cctcagcagctggggagagc

SEQ ID NO: 1483 - DNA, 20 bp, Synthetic construct
  source 1..20: mol_type = other DNA
tccctttgggtaaatactga

SEQ ID NO: 1484 - DNA, 20 bp, Synthetic construct
  source 1..20: mol_type = other DNA
aaattaatttcagaggtgtg

SEQ ID NO: 1485 - DNA, 20 bp, Synthetic construct
  source 1..20: mol_type = other DNA
gaatggtttctctgtttatc

SEQ ID NO: 1486 - DNA, 20 bp, Synthetic construct
  source 1..20: mol_type = other DNA
ccagagctggcgggagggag

SEQ ID NO: 1487 - DNA, 20 bp, Synthetic construct
  source 1..20: mol_type = other DNA
cccctcagtatttacccaaa

SEQ ID NO: 1488 - DNA, 20 bp, Synthetic construct
  source 1..20: mol_type = other DNA
gtcactaactctcagcatgc

SEQ ID NO: 1489 - DNA, 20 bp, Synthetic construct
  source 1..20: mol_type = other DNA
taactctcagcatgctggcc

SEQ ID NO: 1490 - DNA, 20 bp, Synthetic construct
  source 1..20: mol_type = other DNA
ctgccttcagagccggtgcc

SEQ ID NO: 1491 - DNA, 20 bp, Synthetic construct
  source 1..20: mol_type = other DNA
gctcccgcgcgcgctgctgg

SEQ ID NO: 1492 - DNA, 20 bp, Synthetic construct
  source 1..20: mol_type = other DNA
accttgctgtgggccgagcc

SEQ ID NO: 1493 - DNA, 20 bp, Synthetic construct
  source 1..20: mol_type = other DNA
ttaaaaagggtcaggggacg

SEQ ID NO: 1494 - DNA, 20 bp, Synthetic construct
  source 1..20: mol_type = other DNA
tttaaaaagggtcaggggac

SEQ ID NO: 1495 - DNA, 20 bp, Synthetic construct
  source 1..20: mol_type = other DNA
caaaattggagtcagccttg

SEQ ID NO: 1496 - DNA, 20 bp, Synthetic construct
  source 1..20: mol_type = other DNA
cagctctccccagctgctga

SEQ ID NO: 1497 - DNA, 20 bp, Synthetic construct
  source 1..20: mol_type = other DNA
gccgcggccccagagctggc

SEQ ID NO: 1498 - DNA, 20 bp, Synthetic construct
  source 1..20: mol_type = other DNA
ccgcttggggccaccttgca

SEQ ID NO: 1499 - DNA, 20 bp, Synthetic construct
  source 1..20: mol_type = other DNA
tagcttggcgggctcccaac

SEQ ID NO: 1500 - DNA, 20 bp, Synthetic construct
  source 1..20: mol_type = other DNA
gcgggctcccaactggtgac

SEQ ID NO: 1501 - DNA, 20 bp, Synthetic construct
  source 1..20: mol_type = other DNA
ttgcacagaaagtctgttgg

SEQ ID NO: 1502 - DNA, 20 bp, Synthetic construct
  source 1..20: mol_type = other DNA
tagtgatgaggctagtgatg

SEQ ID NO: 1503 - DNA, 20 bp, Synthetic construct
  source 1..20: mol_type = other DNA
aggctgtgtgcttctgagct

SEQ ID NO: 1504 - DNA, 20 bp, Synthetic construct
  source 1..20: mol_type = other DNA
tcgtgccctcagcttcccca

SEQ ID NO: 1505 - DNA, 20 bp, Synthetic construct
  source 1..20: mol_type = other DNA
ggggagggcttaagggagtg

SEQ ID NO: 1506 - DNA, 20 bp, Synthetic construct
  source 1..20: mol_type = other DNA
tcactaaccagtcaccagtt

SEQ ID NO: 1507 - DNA, 20 bp, Synthetic construct
  source 1..20: mol_type = other DNA
ggcatccgaaggcatccttg

SEQ ID NO: 1508 - DNA, 20 bp, Synthetic construct
  source 1..20: mol_type = other DNA
aggtaggacccagcagggcg

SEQ ID NO: 1509 - DNA, 20 bp, Synthetic construct
  source 1..20: mol_type = other DNA
cttgtcttgaggcatctggg

SEQ ID NO: 1510 - DNA, 20 bp, Synthetic construct
  source 1..20: mol_type = other DNA
gcatgttggcttagcttggc

SEQ ID NO: 1511 - DNA, 20 bp, Synthetic construct
  source 1..20: mol_type = other DNA
tccttactgtggactgaatt

SEQ ID NO: 1512 - DNA, 20 bp, Synthetic construct
  source 1..20: mol_type = other DNA
accgcttggggccaccttgc

SEQ ID NO: 1513 - DNA, 20 bp, Synthetic construct
  source 1..20: mol_type = other DNA
tctgaacgtcagactgttga

SEQ ID NO: 1514 - DNA, 20 bp, Synthetic construct
  source 1..20: mol_type = other DNA
gaggtgtggggagggcttaa

SEQ ID NO: 1515 - DNA, 20 bp, Synthetic construct
  source 1..20: mol_type = other DNA
gggaagctgagggcacgagg

SEQ ID NO: 1516 - DNA, 20 bp, Synthetic construct
  source 1..20: mol_type = other DNA
tttccctgcttctctgggta

SEQ ID NO: 1517 - DNA, 20 bp, Synthetic construct
  source 1..20: mol_type = other DNA
ggggacgggggaacagatgg

SEQ ID NO: 1518 - DNA, 20 bp, Synthetic construct
  source 1..20: mol_type = other DNA
tgttgagccctcagcagctg

SEQ ID NO: 1519 - DNA, 20 bp, Synthetic construct
  source 1..20: mol_type = other DNA
aacaccattaggaaactggg

SEQ ID NO: 1520 - DNA, 20 bp, Synthetic construct
  source 1..20: mol_type = other DNA
gtctatttccttccaccgga

SEQ ID NO: 1521 - DNA, 20 bp, Synthetic construct
  source 1..20: mol_type = other DNA
ccctccccccagtttcctaa

SEQ ID NO: 1522 - DNA, 20 bp, Synthetic construct
  source 1..20: mol_type = other DNA
atactgaggggtgcctctgc

SEQ ID NO: 1523 - DNA, 20 bp, Synthetic construct
  source 1..20: mol_type = other DNA
ttggggatgggggtgaggat

SEQ ID NO: 1524 - DNA, 20 bp, Synthetic construct
  source 1..20: mol_type = other DNA
aactctttcacatcttccaa

SEQ ID NO: 1525 - DNA, 20 bp, Synthetic construct
  source 1..20: mol_type = other DNA
gtttctctgtttatctggaa

SEQ ID NO: 1526 - DNA, 20 bp, Synthetic construct
  source 1..20: mol_type = other DNA
ccattctgaattggggatgg

SEQ ID NO: 1527 - DNA, 20 bp, Synthetic construct
  source 1..20: mol_type = other DNA
cagagaaaccattctgaatt

SEQ ID NO: 1528 - DNA, 19 bp, Synthetic construct
  source 1..19: mol_type = other DNA
ggaggacccagcaggaatc

SEQ ID NO: 1529 - DNA, 19 bp, Synthetic construct
  source 1..19: mol_type = other DNA
gagagcctctgctggggac

SEQ ID NO: 1530 - DNA, 19 bp, Synthetic construct
  source 1..19: mol_type = other DNA
acagaaagtctgttggggg

SEQ ID NO: 1531 - DNA, 19 bp, Synthetic construct
  source 1..19: mol_type = other DNA
gtggactgaatttggtgaa

SEQ ID NO: 1532 - DNA, 19 bp, Synthetic construct
  source 1..19: mol_type = other DNA
taggacccagcagggcgtg

SEQ ID NO: 1533 - DNA, 19 bp, Synthetic construct
  source 1..19: mol_type = other DNA
gacaggtaggacccagcag

SEQ ID NO: 1534 - DNA, 19 bp, Synthetic construct
  source 1..19: mol_type = other DNA
ggggagggcagcatccgcc

SEQ ID NO: 1535 - DNA, 19 bp, Synthetic construct
  source 1..19: mol_type = other DNA
gtggtatcaaggaggaagt

SEQ ID NO: 1536 - DNA, 18 bp, Synthetic construct
  source 1..18: mol_type = other DNA
gggtgttcagaaacagaa

SEQ ID NO: 1537 - DNA, 18 bp, Synthetic construct
  source 1..18: mol_type = other DNA
ggagtctgagaaaaggga

SEQ ID NO: 1538 - DNA, 19 bp, Synthetic construct
  source 1..19: mol_type = other DNA
agggcacgaggaggggctg

SEQ ID NO: 1539 - DNA, 19 bp, Synthetic construct
  source 1..19: mol_type = other DNA
gtagtcagatggtttgggg

SEQ ID NO: 1540 - DNA, 18 bp, Synthetic construct
  source 1..18: mol_type = other DNA
gcatgagactttgaggtg

SEQ ID NO: 1541 - DNA, 19 bp, Synthetic construct
  source 1..19: mol_type = other DNA
tggggatgggggtgaggat

SEQ ID NO: 1542 - DNA, 19 bp, Synthetic construct
  source 1..19: mol_type = other DNA
tgggtatggagtggagtct

SEQ ID NO: 1543 - DNA, 19 bp, Synthetic construct
  source 1..19: mol_type = other DNA
gaatttggtgaagacagaa

SEQ ID NO: 1544 - DNA, 18 bp, Synthetic construct
  source 1..18: mol_type = other DNA
ggtcaggggacgggggaa

SEQ ID NO: 1545 - DNA, 18 bp, Synthetic construct
  source 1..18: mol_type = other DNA
gcatgagactttgaggtg

SEQ ID NO: 1546 - DNA, 19 bp, Synthetic construct
  source 1..19: mol_type = other DNA
tgggggtgaggatgggaac

SEQ ID NO: 1547 - DNA, 19 bp, Synthetic construct
  source 1..19: mol_type = other DNA
gtggtatcaaggaggaagt

SEQ ID NO: 1548 - DNA, 19 bp, Synthetic construct
  source 1..19: mol_type = other DNA
gagagcctctgctggggac

SEQ ID NO: 1549 - DNA, 19 bp, Synthetic construct
  source 1..19: mol_type = other DNA
gaatttggtgaagacagaa

SEQ ID NO: 1550 - DNA, 19 bp, Synthetic construct
  source 1..19: mol_type = other DNA
gcaacgcattgtgtaggaa

SEQ ID NO: 1551 - DNA, 19 bp, Synthetic construct
  source 1..19: mol_type = other DNA
taggacccagcagggcgtg

SEQ ID NO: 1552 - DNA, 19 bp, Synthetic construct
  source 1..19: mol_type = other DNA
tgggtatggagtggagtct

SEQ ID NO: 1553 - DNA, 19 bp, Synthetic construct
  source 1..19: mol_type = other DNA
gaggctgtgtgcttctgag

SEQ ID NO: 1554 - DNA, 19 bp, Synthetic construct
  source 1..19: mol_type = other DNA
gaggctgtgtgcttctgag

SEQ ID NO: 1555 - DNA, 18 bp, Synthetic construct
  source 1..18: mol_type = other DNA
ggctgggaagggtgtgcc

SEQ ID NO: 1556 - DNA, 19 bp, Synthetic construct
  source 1..19: mol_type = other DNA
gcaatttggtgtgggagta

SEQ ID NO: 1557 - DNA, 19 bp, Synthetic construct
  source 1..19: mol_type = other DNA
gaacagatggtgggaagag

SEQ ID NO: 1558 - DNA, 19 bp, Synthetic construct
  source 1..19: mol_type = other DNA
gtggtatcaaggaggaagt

SEQ ID NO: 1559 - DNA, 19 bp, Synthetic construct
  source 1..19: mol_type = other DNA
gagagcctctgctggggac

SEQ ID NO: 1560 - DNA, 19 bp, Synthetic construct
  source 1..19: mol_type = other DNA
gaatttggtgaagacagaa

SEQ ID NO: 1561 - DNA, 19 bp, Synthetic construct
  source 1..19: mol_type = other DNA
gcaacgcattgtgtaggaa

SEQ ID NO: 1562 - DNA, 19 bp, Synthetic construct
  source 1..19: mol_type = other DNA
gacaggtaggacccagcag

SEQ ID NO: 1563 - DNA, 19 bp, Synthetic construct
  source 1..19: mol_type = other DNA
tgggtatggagtggagtct

SEQ ID NO: 1564 - DNA, 19 bp, Synthetic construct
  source 1..19: mol_type = other DNA
gaggctgtgtgcttctgag

SEQ ID NO: 1565 - DNA, 18 bp, Synthetic construct
  source 1..18: mol_type = other DNA
taagttgctacgggaaag

SEQ ID NO: 1566 - DNA, 19 bp, Synthetic construct
  source 1..19: mol_type = other DNA
gcaatttggtgtgggagta

SEQ ID NO: 1567 - DNA, 19 bp, Synthetic construct
  source 1..19: mol_type = other DNA
gaacagatggtgggaagag

SEQ ID NO: 1568 - DNA, 19 bp, Synthetic construct
  source 1..19: mol_type = other DNA
gtagtcagatggtttgggg

SEQ ID NO: 1569 - DNA, 19 bp, Synthetic construct
  source 1..19: mol_type = other DNA
acagaaagtctgttggggg

SEQ ID NO: 1570 - DNA, 19 bp, Synthetic construct
  source 1..19: mol_type = other DNA
gtggactgaatttggtgaa

SEQ ID NO: 1571 - DNA, 19 bp, Synthetic construct
  source 1..19: mol_type = other DNA
gcaacgcattgtgtaggaa

SEQ ID NO: 1572 - DNA, 19 bp, Synthetic construct
  source 1..19: mol_type = other DNA
gacaggtaggacccagcag

SEQ ID NO: 1573 - DNA, 19 bp, Synthetic construct
  source 1..19: mol_type = other DNA
ggggagggcagcatccgcc

SEQ ID NO: 1574 - DNA, 19 bp, Synthetic construct
  source 1..19: mol_type = other DNA
gaggctgtgtgcttctgag

SEQ ID NO: 1575 - DNA, 18 bp, Synthetic construct
  source 1..18: mol_type = other DNA
ctggaatggcaggaccag

SEQ ID NO: 1576 - DNA, 19 bp, Synthetic construct
  source 1..19: mol_type = other DNA
gaggcatctgggcggaggg

SEQ ID NO: 1577 - DNA, 19 bp, Synthetic construct
  source 1..19: mol_type = other DNA
gaacagatggtgggaagag

SEQ ID NO: 1578 - DNA, 19 bp, Synthetic construct
  source 1..19: mol_type = other DNA
gtagtcagatggtttgggg

SEQ ID NO: 1579 - DNA, 19 bp, Synthetic construct
  source 1..19: mol_type = other DNA
acagaaagtctgttggggg

SEQ ID NO: 1580 - DNA, 19 bp, Synthetic construct
  source 1..19: mol_type = other DNA
gtggactgaatttggtgaa

SEQ ID NO: 1581 - DNA, 19 bp, Synthetic construct
  source 1..19: mol_type = other DNA
taggacccagcagggcgtg

SEQ ID NO: 1582 - DNA, 19 bp, Synthetic construct
  source 1..19: mol_type = other DNA
gacaggtaggacccagcag

SEQ ID NO: 1583 - DNA, 19 bp, Synthetic construct
  source 1..19: mol_type = other DNA
ggggagggcagcatccgcc

SEQ ID NO: 1584 - DNA, 19 bp, Synthetic construct
  source 1..19: mol_type = other DNA
gaggctgtgtgcttctgag

SEQ ID NO: 1585 - DNA, 18 bp, Synthetic construct
  source 1..18: mol_type = other DNA
ctggaatggcaggaccag

SEQ ID NO: 1586 - DNA, 18 bp, Synthetic construct
  source 1..18: mol_type = other DNA
ggagtggagtctggcaga

SEQ ID NO: 1587 - DNA, 19 bp, Synthetic construct
  source 1..19: mol_type = other DNA
taggaactggaattgagct

SEQ ID NO: 1588 - DNA, 19 bp, Synthetic construct
  source 1..19: mol_type = other DNA
gagagcctctgctggggac

SEQ ID NO: 1589 - DNA, 19 bp, Synthetic construct
  source 1..19: mol_type = other DNA
acagaaagtctgttggggg

SEQ ID NO: 1590 - DNA, 19 bp, Synthetic construct
  source 1..19: mol_type = other DNA
gtggactgaatttggtgaa

SEQ ID NO: 1591 - DNA, 19 bp, Synthetic construct
  source 1..19: mol_type = other DNA
taggacccagcagggcgtg

SEQ ID NO: 1592 - DNA, 19 bp, Synthetic construct
  source 1..19: mol_type = other DNA
gacaggtaggacccagcag

SEQ ID NO: 1593 - DNA, 19 bp, Synthetic construct
  source 1..19: mol_type = other DNA
ggggagggcagcatccgcc

SEQ ID NO: 1594 - DNA, 19 bp, Synthetic construct
  source 1..19: mol_type = other DNA
gaggctgtgtgcttctgag

SEQ ID NO: 1595 - DNA, 19 bp, Synthetic construct
  source 1..19: mol_type = other DNA
gatggttaaaggggtggta

SEQ ID NO: 1596 - DNA, 19 bp, Synthetic construct
  source 1..19: mol_type = other DNA
tggggaagctgagggcacg

SEQ ID NO: 1597 - DNA, 19 bp, Synthetic construct
  source 1..19: mol_type = other DNA
ggagctgctgcctggctgg

SEQ ID NO: 1598 - DNA, 19 bp, Synthetic construct
  source 1..19: mol_type = other DNA
tgggggtgaggatgggaac

SEQ ID NO: 1599 - DNA, 19 bp, Synthetic construct
  source 1..19: mol_type = other DNA
gcagctggggagagctggc

SEQ ID NO: 1600 - DNA, 19 bp, Synthetic construct
  source 1..19: mol_type = other DNA
gctggggagagctggcgga

SEQ ID NO: 1601 - DNA, 19 bp, Synthetic construct
  source 1..19: mol_type = other DNA
gacgggggaacagatggtg

SEQ ID NO: 1602 - DNA, 19 bp, Synthetic construct
  source 1..19: mol_type = other DNA
gttggctgggaagggtgtg

SEQ ID NO: 1603 - DNA, 19 bp, Synthetic construct
  source 1..19: mol_type = other DNA
taggaactggaattgagct

SEQ ID NO: 1604 - DNA, 19 bp, Synthetic construct
  source 1..19: mol_type = other DNA
ggtgtggttgggtgcagcc

SEQ ID NO: 1605 - DNA, 19 bp, Synthetic construct
  source 1..19: mol_type = other DNA
ggagggggagaagtcagag

SEQ ID NO: 1606 - DNA, 19 bp, Synthetic construct
  source 1..19: mol_type = other DNA
ggagggggagaagtcagag

SEQ ID NO: 1607 - DNA, 19 bp, Synthetic construct
  source 1..19: mol_type = other DNA
tggggaagctgagggcacg

SEQ ID NO: 1608 - DNA, 19 bp, Synthetic construct
  source 1..19: mol_type = other DNA
ggagctgctgcctggctgg

SEQ ID NO: 1609 - DNA, 19 bp, Synthetic construct
  source 1..19: mol_type = other DNA
tgggggtgaggatgggaac

SEQ ID NO: 1610 - DNA, 19 bp, Synthetic construct
  source 1..19: mol_type = other DNA
gcagctggggagagctggc

SEQ ID NO: 1611 - DNA, 19 bp, Synthetic construct
  source 1..19: mol_type = other DNA
ggggagagctggcggatgc

SEQ ID NO: 1612 - DNA, 19 bp, Synthetic construct
  source 1..19: mol_type = other DNA
gacgggggaacagatggtg

SEQ ID NO: 1613 - DNA, 19 bp, Synthetic construct
  source 1..19: mol_type = other DNA
gttggctgggaagggtgtg

SEQ ID NO: 1614 - DNA, 19 bp, Synthetic construct
  source 1..19: mol_type = other DNA
taggaactggaattgagct

SEQ ID NO: 1615 - DNA, 19 bp, Synthetic construct
  source 1..19: mol_type = other DNA
ggtgtggttgggtgcagcc

SEQ ID NO: 1616 - DNA, 19 bp, Synthetic construct
  source 1..19: mol_type = other DNA
ggagggggagaagtcagag

SEQ ID NO: 1617 - DNA, 19 bp, Synthetic construct
  source 1..19: mol_type = other DNA
tggggaagctgagggcacg

SEQ ID NO: 1618 - DNA, 19 bp, Synthetic construct
  source 1..19: mol_type = other DNA
ggagctgctgcctggctgg

SEQ ID NO: 1619 - DNA, 19 bp, Synthetic construct
  source 1..19: mol_type = other DNA
gaggatgggaacaggagtc

SEQ ID NO: 1620 - DNA, 19 bp, Synthetic construct
  source 1..19: mol_type = other DNA
gcagctggggagagctggc

SEQ ID NO: 1621 - DNA, 19 bp, Synthetic construct
  source 1..19: mol_type = other DNA
ggggagagctggcggatgc

SEQ ID NO: 1622 - DNA, 19 bp, Synthetic construct
  source 1..19: mol_type = other DNA
gacgggggaacagatggtg

SEQ ID NO: 1623 - DNA, 19 bp, Synthetic construct
  source 1..19: mol_type = other DNA
gttggctgggaagggtgtg

SEQ ID NO: 1624 - DNA, 19 bp, Synthetic construct
  source 1..19: mol_type = other DNA
gatggttaaaggggtggta

SEQ ID NO: 1625 - DNA, 19 bp, Synthetic construct
  source 1..19: mol_type = other DNA
gcagccttaagttgctacg

SEQ ID NO: 1626 - DNA, 19 bp, Synthetic construct
  source 1..19: mol_type = other DNA
gggggagaagtcagaggta

SEQ ID NO: 1627 - DNA, 19 bp, Synthetic construct
  source 1..19: mol_type = other DNA
gctgagggcacgaggaggg

SEQ ID NO: 1628 - DNA, 19 bp, Synthetic construct
  source 1..19: mol_type = other DNA
ggagctgctgcctggctgg

SEQ ID NO: 1629 - DNA, 19 bp, Synthetic construct
  source 1..19: mol_type = other DNA
gaggatgggaacaggagtc

SEQ ID NO: 1630 - DNA, 19 bp, Synthetic construct
  source 1..19: mol_type = other DNA
gctggggagagctggcgga

SEQ ID NO: 1631 - DNA, 19 bp, Synthetic construct
  source 1..19: mol_type = other DNA
ggggagagctggcggatgc

SEQ ID NO: 1632 - DNA, 19 bp, Synthetic construct
  source 1..19: mol_type = other DNA
gacgggggaacagatggtg

SEQ ID NO: 1633 - DNA, 19 bp, Synthetic construct
  source 1..19: mol_type = other DNA
gttggctgggaagggtgtg

SEQ ID NO: 1634 - DNA, 19 bp, Synthetic construct
  source 1..19: mol_type = other DNA
gatggttaaaggggtggta

SEQ ID NO: 1635 - DNA, 19 bp, Synthetic construct
  source 1..19: mol_type = other DNA
gcagccttaagttgctacg

SEQ ID NO: 1636 - DNA, 19 bp, Synthetic construct
  source 1..19: mol_type = other DNA
gggggagaagtcagaggta

SEQ ID NO: 1637 - DNA, 19 bp, Synthetic construct
  source 1..19: mol_type = other DNA
gctgagggcacgaggaggg

SEQ ID NO: 1638 - DNA, 19 bp, Synthetic construct
  source 1..19: mol_type = other DNA
ggagctgctgcctggctgg

SEQ ID NO: 1639 - DNA, 19 bp, Synthetic construct
  source 1..19: mol_type = other DNA
gaggatgggaacaggagtc

SEQ ID NO: 1640 - DNA, 19 bp, Synthetic construct
  source 1..19: mol_type = other DNA
gctggggagagctggcgga

SEQ ID NO: 1641 - DNA, 19 bp, Synthetic construct
  source 1..19: mol_type = other DNA
ggggagagctggcggatgc

SEQ ID NO: 1642 - DNA, 19 bp, Synthetic construct
  source 1..19: mol_type = other DNA
gaacagatggtgggaagag

SEQ ID NO: 1643 - DNA, 19 bp, Synthetic construct
  source 1..19: mol_type = other DNA
gttggctgggaagggtgtg

SEQ ID NO: 1644 - DNA, 19 bp, Synthetic construct
  source 1..19: mol_type = other DNA
gatggttaaaggggtggta

SEQ ID NO: 1645 - DNA, 19 bp, Synthetic construct
  source 1..19: mol_type = other DNA
gcagccttaagttgctacg

SEQ ID NO: 1646 - DNA, 19 bp, Synthetic construct
  source 1..19: mol_type = other DNA
gggggagaagtcagaggta

SEQ ID NO: 1647 - DNA, 19 bp, Synthetic construct
  source 1..19: mol_type = other DNA
gctgagggcacgaggaggg

SEQ ID NO: 1648 - DNA, 19 bp, Synthetic construct
  source 1..19: mol_type = other DNA
ggagctgctgcctggctgg

SEQ ID NO: 1649 - DNA, 19 bp, Synthetic construct
  source 1..19: mol_type = other DNA
gcagctggggagagctggc

SEQ ID NO: 1650 - DNA, 19 bp, Synthetic construct
  source 1..19: mol_type = other DNA
gctggggagagctggcgga

SEQ ID NO: 1651 - DNA, 19 bp, Synthetic construct
  source 1..19: mol_type = other DNA
ggggagagctggcggatgc

SEQ ID NO: 1652 - DNA, 19 bp, Synthetic construct
  source 1..19: mol_type = other DNA
gaacagatggtgggaagag

SEQ ID NO: 1653 - DNA, 19 bp, Synthetic construct
  source 1..19: mol_type = other DNA
taggaactggaattgagct

SEQ ID NO: 1654 - DNA, 19 bp, Synthetic construct
  source 1..19: mol_type = other DNA
gatggttaaaggggtggta

SEQ ID NO: 1655 - DNA, 19 bp, Synthetic construct
  source 1..19: mol_type = other DNA
gctacgggaaagtgttgga

SEQ ID NO: 1656 - DNA, 19 bp, Synthetic construct
  source 1..19: mol_type = other DNA
agggcacgaggaggggctg

SEQ ID NO: 1657 - DNA, 19 bp, Synthetic construct
  source 1..19: mol_type = other DNA
tggggatgggggtgaggat

SEQ ID NO: 1658 - DNA, 19 bp, Synthetic construct
  source 1..19: mol_type = other DNA
gcagctggggagagctggc

SEQ ID NO: 1659 - DNA, 19 bp, Synthetic construct
  source 1..19: mol_type = other DNA
gctggggagagctggcgga

SEQ ID NO: 1660 - DNA, 19 bp, Synthetic construct
  source 1..19: mol_type = other DNA
gacgggggaacagatggtg

SEQ ID NO: 1661 - DNA, 19 bp, Synthetic construct
  source 1..19: mol_type = other DNA
gaacagatggtgggaagag

SEQ ID NO: 1662 - DNA, 19 bp, Synthetic construct
  source 1..19: mol_type = other DNA
taggaactggaattgagct

SEQ ID NO: 1663 - DNA, 19 bp, Synthetic construct
  source 1..19: mol_type = other DNA
gatggttaaaggggtggta

SEQ ID NO: 1664 - DNA, 19 bp, Synthetic construct
  source 1..19: mol_type = other DNA
gctacgggaaagtgttgga

SEQ ID NO: 1665 - DNA, 19 bp, Synthetic construct
  source 1..19: mol_type = other DNA
agggcacgaggaggggctg

SEQ ID NO: 1666 - DNA, 19 bp, Synthetic construct
  source 1..19: mol_type = other DNA
tggggatgggggtgaggat

SEQ ID NO: 1667 - DNA, 19 bp, Synthetic construct
  source 1..19: mol_type = other DNA
gcagctggggagagctggc

SEQ ID NO: 1668 - DNA, 19 bp, Synthetic construct
  source 1..19: mol_type = other DNA
gctggggagagctggcgga

SEQ ID NO: 1669 - DNA, 19 bp, Synthetic construct
  source 1..19: mol_type = other DNA
gacgggggaacagatggtg

SEQ ID NO: 1670 - DNA, 19 bp, Synthetic construct
  source 1..19: mol_type = other DNA
gttggctgggaagggtgtg

SEQ ID NO: 1671 - DNA, 19 bp, Synthetic construct
  source 1..19: mol_type = other DNA
taggaactggaattgagct

SEQ ID NO: 1672 - DNA, 19 bp, Synthetic construct
  source 1..19: mol_type = other DNA
ggtgtggttgggtgcagcc

SEQ ID NO: 1673 - DNA, 19 bp, Synthetic construct
  source 1..19: mol_type = other DNA
gctacgggaaagtgttgga

SEQ ID NO: 1674 - DNA, 18 bp, Synthetic construct
  source 1..18: mol_type = other DNA
gaaaatgacaggtgggcc

SEQ ID NO: 1675 - DNA, 18 bp, Synthetic construct
  source 1..18: mol_type = other DNA
ttggtgtgggagtaggca

SEQ ID NO: 1676 - DNA, 18 bp, Synthetic construct
  source 1..18: mol_type = other DNA
ggtcaggggacgggggaa

SEQ ID NO: 1677 - DNA, 18 bp, Synthetic construct
  source 1..18: mol_type = other DNA
ggctgggaagggtgtgcc

SEQ ID NO: 1678 - DNA, 18 bp, Synthetic construct
  source 1..18: mol_type = other DNA
gttggagggggagaagtc

SEQ ID NO: 1679 - DNA, 18 bp, Synthetic construct
  source 1..18: mol_type = other DNA
ctggaatggcaggaccag

SEQ ID NO: 1680 - DNA, 18 bp, Synthetic construct
  source 1..18: mol_type = other DNA
gccaacggtgtagctgcc

SEQ ID NO: 1681 - DNA, 18 bp, Synthetic construct
  source 1..18: mol_type = other DNA
ggagtctgagaaaaggga

SEQ ID NO: 1682 - DNA, 19 bp, Synthetic construct
  source 1..19: mol_type = other DNA
gcaatttggtgtgggagta

SEQ ID NO: 1683 - DNA, 19 bp, Synthetic construct
  source 1..19: mol_type = other DNA
gaggcatctgggcggaggg

SEQ ID NO: 1684 - DNA, 18 bp, Synthetic construct
  source 1..18: mol_type = other DNA
gaaaatgacaggtgggcc

SEQ ID NO: 1685 - DNA, 18 bp, Synthetic construct
  source 1..18: mol_type = other DNA
gggtgttcagaaacagaa

SEQ ID NO: 1686 - DNA, 18 bp, Synthetic construct
  source 1..18: mol_type = other DNA
ggtcaggggacgggggaa

SEQ ID NO: 1687 - DNA, 18 bp, Synthetic construct
  source 1..18: mol_type = other DNA
ggctgggaagggtgtgcc

SEQ ID NO: 1688 - DNA, 18 bp, Synthetic construct
  source 1..18: mol_type = other DNA
gttggagggggagaagtc

SEQ ID NO: 1689 - DNA, 18 bp, Synthetic construct
  source 1..18: mol_type = other DNA
ctggaatggcaggaccag

SEQ ID NO: 1690 - DNA, 18 bp, Synthetic construct
  source 1..18: mol_type = other DNA
gccaacggtgtagctgcc

SEQ ID NO: 1691 - DNA, 18 bp, Synthetic construct
  source 1..18: mol_type = other DNA
gcatgagactttgaggtg

SEQ ID NO: 1692 - DNA, 19 bp, Synthetic construct
  source 1..19: mol_type = other DNA
gaagtccccagcagaggct

SEQ ID NO: 1693 - DNA, 18 bp, Synthetic construct
  source 1..18: mol_type = other DNA
gaaaatgacaggtgggcc

SEQ ID NO: 1694 - DNA, 18 bp, Synthetic construct
  source 1..18: mol_type = other DNA
gggtgttcagaaacagaa

SEQ ID NO: 1695 - DNA, 18 bp, Synthetic construct
  source 1..18: mol_type = other DNA
ggtcaggggacgggggaa

SEQ ID NO: 1696 - DNA, 18 bp, Synthetic construct
  source 1..18: mol_type = other DNA
gccggtgtggttgggtgc

SEQ ID NO: 1697 - DNA, 18 bp, Synthetic construct
  source 1..18: mol_type = other DNA
gaggacccagcaggaatc

SEQ ID NO: 1698 - DNA, 18 bp, Synthetic construct
  source 1..18: mol_type = other DNA
ctggaatggcaggaccag

SEQ ID NO: 1699 - DNA, 18 bp, Synthetic construct
  source 1..18: mol_type = other DNA
gccaacggtgtagctgcc

SEQ ID NO: 1700 - DNA, 19 bp, Synthetic construct
  source 1..19: mol_type = other DNA
gatactgttgactgtagaa

SEQ ID NO: 1701 - DNA, 19 bp, Synthetic construct
  source 1..19: mol_type = other DNA
gaagtccccagcagaggct

SEQ ID NO: 1702 - DNA, 18 bp, Synthetic construct
  source 1..18: mol_type = other DNA
gaaaatgacaggtgggcc

SEQ ID NO: 1703 - DNA, 18 bp, Synthetic construct
  source 1..18: mol_type = other DNA
gggtgttcagaaacagaa

SEQ ID NO: 1704 - DNA, 18 bp, Synthetic construct
  source 1..18: mol_type = other DNA
ggtcaggggacgggggaa

SEQ ID NO: 1705 - DNA, 18 bp, Synthetic construct
  source 1..18: mol_type = other DNA
gccggtgtggttgggtgc

SEQ ID NO: 1706 - DNA, 18 bp, Synthetic construct
  source 1..18: mol_type = other DNA
gaggacccagcaggaatc

SEQ ID NO: 1707 - DNA, 18 bp, Synthetic construct
  source 1..18: mol_type = other DNA
ctggaatggcaggaccag

SEQ ID NO: 1708 - DNA, 18 bp, Synthetic construct
  source 1..18: mol_type = other DNA
gccaacggtgtagctgcc

SEQ ID NO: 1709 - DNA, 19 bp, Synthetic construct
  source 1..19: mol_type = other DNA
gatactgttgactgtagaa

SEQ ID NO: 1710 - DNA, 19 bp, Synthetic construct
  source 1..19: mol_type = other DNA
gaagtccccagcagaggct

SEQ ID NO: 1711 - DNA, 18 bp, Synthetic construct
  source 1..18: mol_type = other DNA
gaaaatgacaggtgggcc

SEQ ID NO: 1712 - DNA, 18 bp, Synthetic construct
  source 1..18: mol_type = other DNA
gggtgttcagaaacagaa

SEQ ID NO: 1713 - DNA, 18 bp, Synthetic construct
  source 1..18: mol_type = other DNA
ggtcaggggacgggggaa

SEQ ID NO: 1714 - DNA, 18 bp, Synthetic construct
  source 1..18: mol_type = other DNA
gccggtgtggttgggtgc

SEQ ID NO: 1715 - DNA, 18 bp, Synthetic construct
  source 1..18: mol_type = other DNA
gaggacccagcaggaatc

SEQ ID NO: 1716 - DNA, 18 bp, Synthetic construct
  source 1..18: mol_type = other DNA
ggagtggagtctggcaga

SEQ ID NO: 1717 - DNA, 18 bp, Synthetic construct
  source 1..18: mol_type = other DNA
ggagtctgagaaaaggga

SEQ ID NO: 1718 - DNA, 19 bp, Synthetic construct
  source 1..19: mol_type = other DNA
gatactgttgactgtagaa

SEQ ID NO: 1719 - DNA, 19 bp, Synthetic construct
  source 1..19: mol_type = other DNA
gaggcatctgggcggaggg

SEQ ID NO: 1720 - DNA, 18 bp, Synthetic construct
  source 1..18: mol_type = other DNA
gaaaatgacaggtgggcc

SEQ ID NO: 1721 - DNA, 18 bp, Synthetic construct
  source 1..18: mol_type = other DNA
ggggaagctgagggcacg

SEQ ID NO: 1722 - DNA, 18 bp, Synthetic construct
  source 1..18: mol_type = other DNA
ggctgggaagggtgtgcc

SEQ ID NO: 1723 - DNA, 18 bp, Synthetic construct
  source 1..18: mol_type = other DNA
taagttgctacgggaaag

SEQ ID NO: 1724 - DNA, 18 bp, Synthetic construct
  source 1..18: mol_type = other DNA
gacaggtaggacccagca

SEQ ID NO: 1725 - DNA, 18 bp, Synthetic construct
  source 1..18: mol_type = other DNA
ggagtggagtctggcaga

SEQ ID NO: 1726 - DNA, 18 bp, Synthetic construct
  source 1..18: mol_type = other DNA
ggagtctgagaaaaggga

SEQ ID NO: 1727 - DNA, 19 bp, Synthetic construct
  source 1..19: mol_type = other DNA
gactgtagaaggctctgag

SEQ ID NO: 1728 - DNA, 19 bp, Synthetic construct
  source 1..19: mol_type = other DNA
gaggcatctgggcggaggg

SEQ ID NO: 1729 - DNA, 18 bp, Synthetic construct
  source 1..18: mol_type = other DNA
ttggtgtgggagtaggca

SEQ ID NO: 1730 - DNA, 18 bp, Synthetic construct
  source 1..18: mol_type = other DNA
ggggaagctgagggcacg

SEQ ID NO: 1731 - DNA, 18 bp, Synthetic construct
  source 1..18: mol_type = other DNA
ggctgggaagggtgtgcc

SEQ ID NO: 1732 - DNA, 18 bp, Synthetic construct
  source 1..18: mol_type = other DNA
taagttgctacgggaaag

SEQ ID NO: 1733 - DNA, 18 bp, Synthetic construct
  source 1..18: mol_type = other DNA
gacaggtaggacccagca

SEQ ID NO: 1734 - DNA, 18 bp, Synthetic construct
  source 1..18: mol_type = other DNA
gccaacggtgtagctgcc

SEQ ID NO: 1735 - DNA, 18 bp, Synthetic construct
  source 1..18: mol_type = other DNA
ggagtctgagaaaaggga

SEQ ID NO: 1736 - DNA, 19 bp, Synthetic construct
  source 1..19: mol_type = other DNA
gactgtagaaggctctgag

SEQ ID NO: 1737 - DNA, 19 bp, Synthetic construct
  source 1..19: mol_type = other DNA
gaggcatctgggcggaggg

SEQ ID NO: 1738 - DNA, 18 bp, Synthetic construct
  source 1..18: mol_type = other DNA
ttggtgtgggagtaggca

SEQ ID NO: 1739 - DNA, 18 bp, Synthetic construct
  source 1..18: mol_type = other DNA
ggggaagctgagggcacg

SEQ ID NO: 1740 - DNA, 18 bp, Synthetic construct
  source 1..18: mol_type = other DNA
ggctgggaagggtgtgcc

SEQ ID NO: 1741 - DNA, 18 bp, Synthetic construct
  source 1..18: mol_type = other DNA
gttggagggggagaagtc

SEQ ID NO: 1742 - DNA, 18 bp, Synthetic construct
  source 1..18: mol_type = other DNA
gacaggtaggacccagca

SEQ ID NO: 1743 - DNA, 18 bp, Synthetic construct
  source 1..18: mol_type = other DNA
gccaacggtgtagctgcc

SEQ ID NO: 1744 - DNA, 18 bp, Synthetic construct
  source 1..18: mol_type = other DNA
ggagtctgagaaaaggga

SEQ ID NO: 1745 - DNA, 19 bp, Synthetic construct
  source 1..19: mol_type = other DNA
gactgtagaaggctctgag

SEQ ID NO: 1746 - DNA, 19 bp, Synthetic construct
  source 1..19: mol_type = other DNA
gaggcatctgggcggaggg

SEQ ID NO: 1747 - DNA, 19 bp, Synthetic construct
  source 1..19: mol_type = other DNA
tggggaagctgagggcacg

SEQ ID NO: 1748 - DNA, 19 bp, Synthetic construct
  source 1..19: mol_type = other DNA
ggagctgctgcctggctgg

SEQ ID NO: 1749 - DNA, 19 bp, Synthetic construct
  source 1..19: mol_type = other DNA
tgggggtgaggatgggaac

SEQ ID NO: 1750 - DNA, 19 bp, Synthetic construct
  source 1..19: mol_type = other DNA
gcagctggggagagctggc

SEQ ID NO: 1751 - DNA, 19 bp, Synthetic construct
  source 1..19: mol_type = other DNA
gctggggagagctggcgga

SEQ ID NO: 1752 - DNA, 19 bp, Synthetic construct
  source 1..19: mol_type = other DNA
gacgggggaacagatggtg

SEQ ID NO: 1753 - DNA, 19 bp, Synthetic construct
  source 1..19: mol_type = other DNA
gttggctgggaagggtgtg

SEQ ID NO: 1754 - DNA, 19 bp, Synthetic construct
  source 1..19: mol_type = other DNA
taggaactggaattgagct

SEQ ID NO: 1755 - DNA, 19 bp, Synthetic construct
  source 1..19: mol_type = other DNA
ggtgtggttgggtgcagcc

SEQ ID NO: 1756 - DNA, 19 bp, Synthetic construct
  source 1..19: mol_type = other DNA
ggagggggagaagtcagag

SEQ ID NO: 1757 - DNA, 19 bp, Synthetic construct
  source 1..19: mol_type = other DNA
tggggaagctgagggcacg

SEQ ID NO: 1758 - DNA, 19 bp, Synthetic construct
  source 1..19: mol_type = other DNA
ggagctgctgcctggctgg

SEQ ID NO: 1759 - DNA, 19 bp, Synthetic construct
  source 1..19: mol_type = other DNA
tgggggtgaggatgggaac

SEQ ID NO: 1760 - DNA, 19 bp, Synthetic construct
  source 1..19: mol_type = other DNA
gcagctggggagagctggc

SEQ ID NO: 1761 - DNA, 19 bp, Synthetic construct
  source 1..19: mol_type = other DNA
ggggagagctggcggatgc

SEQ ID NO: 1762 - DNA, 19 bp, Synthetic construct
  source 1..19: mol_type = other DNA
gacgggggaacagatggtg

SEQ ID NO: 1763 - DNA, 19 bp, Synthetic construct
  source 1..19: mol_type = other DNA
gttggctgggaagggtgtg

SEQ ID NO: 1764 - DNA, 19 bp, Synthetic construct
  source 1..19: mol_type = other DNA
taggaactggaattgagct

SEQ ID NO: 1765 - DNA, 19 bp, Synthetic construct
  source 1..19: mol_type = other DNA
ggtgtggttgggtgcagcc

SEQ ID NO: 1766 - DNA, 19 bp, Synthetic construct
  source 1..19: mol_type = other DNA
ggagggggagaagtcagag

SEQ ID NO: 1767 - DNA, 19 bp, Synthetic construct
  source 1..19: mol_type = other DNA
tggggaagctgagggcacg

SEQ ID NO: 1768 - DNA, 19 bp, Synthetic construct
  source 1..19: mol_type = other DNA
ggagctgctgcctggctgg

SEQ ID NO: 1769 - DNA, 19 bp, Synthetic construct
  source 1..19: mol_type = other DNA
gaggatgggaacaggagtc

SEQ ID NO: 1770 - DNA, 19 bp, Synthetic construct
  source 1..19: mol_type = other DNA
gcagctggggagagctggc

SEQ ID NO: 1771 - DNA, 19 bp, Synthetic construct
  source 1..19: mol_type = other DNA
ggggagagctggcggatgc

SEQ ID NO: 1772 - DNA, 19 bp, Synthetic construct
  source 1..19: mol_type = other DNA
gacgggggaacagatggtg

SEQ ID NO: 1773 - DNA, 19 bp, Synthetic construct
  source 1..19: mol_type = other DNA
gttggctgggaagggtgtg

SEQ ID NO: 1774 - DNA, 19 bp, Synthetic construct
  source 1..19: mol_type = other DNA
gatggttaaaggggtggta

SEQ ID NO: 1775 - DNA, 19 bp, Synthetic construct
  source 1..19: mol_type = other DNA
gcagccttaagttgctacg

SEQ ID NO: 1776 - DNA, 19 bp, Synthetic construct
  source 1..19: mol_type = other DNA
gggggagaagtcagaggta

SEQ ID NO: 1777 - DNA, 19 bp, Synthetic construct
  source 1..19: mol_type = other DNA
gctgagggcacgaggaggg

SEQ ID NO: 1778 - DNA, 19 bp, Synthetic construct
  source 1..19: mol_type = other DNA
ggagctgctgcctggctgg

SEQ ID NO: 1779 - DNA, 19 bp, Synthetic construct
  source 1..19: mol_type = other DNA
gaggatgggaacaggagtc

SEQ ID NO: 1780 - DNA, 19 bp, Synthetic construct
  source 1..19: mol_type = other DNA
gctggggagagctggcgga

SEQ ID NO: 1781 - DNA, 19 bp, Synthetic construct
  source 1..19: mol_type = other DNA
ggggagagctggcggatgc

SEQ ID NO: 1782 - DNA, 19 bp, Synthetic construct
  source 1..19: mol_type = other DNA
gacgggggaacagatggtg

SEQ ID NO: 1783 - DNA, 19 bp, Synthetic construct
  source 1..19: mol_type = other DNA
gttggctgggaagggtgtg

SEQ ID NO: 1784 - DNA, 19 bp, Synthetic construct
  source 1..19: mol_type = other DNA
gatggttaaaggggtggta

SEQ ID NO: 1785 - DNA, 19 bp, Synthetic construct
  source 1..19: mol_type = other DNA
gcagccttaagttgctacg

SEQ ID NO: 1786 - DNA, 19 bp, Synthetic construct
  source 1..19: mol_type = other DNA
gggggagaagtcagaggta

SEQ ID NO: 1787 - DNA, 19 bp, Synthetic construct
  source 1..19: mol_type = other DNA
gctgagggcacgaggaggg

SEQ ID NO: 1788 - DNA, 19 bp, Synthetic construct
  source 1..19: mol_type = other DNA
ggagctgctgcctggctgg

SEQ ID NO: 1789 - DNA, 19 bp, Synthetic construct
  source 1..19: mol_type = other DNA
gaggatgggaacaggagtc

SEQ ID NO: 1790 - DNA, 19 bp, Synthetic construct
  source 1..19: mol_type = other DNA
gctggggagagctggcgga

SEQ ID NO: 1791 - DNA, 19 bp, Synthetic construct
  source 1..19: mol_type = other DNA
ggggagagctggcggatgc

SEQ ID NO: 1792 - DNA, 19 bp, Synthetic construct
  source 1..19: mol_type = other DNA
gaacagatggtgggaagag

SEQ ID NO: 1793 - DNA, 19 bp, Synthetic construct
  source 1..19: mol_type = other DNA
gttggctgggaagggtgtg

SEQ ID NO: 1794 - DNA, 19 bp, Synthetic construct
  source 1..19: mol_type = other DNA
gatggttaaaggggtggta

SEQ ID NO: 1795 - DNA, 19 bp, Synthetic construct
  source 1..19: mol_type = other DNA
gcagccttaagttgctacg

SEQ ID NO: 1796 - DNA, 19 bp, Synthetic construct
  source 1..19: mol_type = other DNA
gggggagaagtcagaggta

SEQ ID NO: 1797 - DNA, 19 bp, Synthetic construct
  source 1..19: mol_type = other DNA
gctgagggcacgaggaggg

SEQ ID NO: 1798 - DNA, 19 bp, Synthetic construct
  source 1..19: mol_type = other DNA
ggagctgctgcctggctgg

SEQ ID NO: 1799 - DNA, 19 bp, Synthetic construct
  source 1..19: mol_type = other DNA
gcagctggggagagctggc

SEQ ID NO: 1800 - DNA, 19 bp, Synthetic construct
  source 1..19: mol_type = other DNA
gctggggagagctggcgga

SEQ ID NO: 1801 - DNA, 19 bp, Synthetic construct
  source 1..19: mol_type = other DNA
ggggagagctggcggatgc

SEQ ID NO: 1802 - DNA, 19 bp, Synthetic construct
  source 1..19: mol_type = other DNA
gaacagatggtgggaagag

SEQ ID NO: 1803 - DNA, 19 bp, Synthetic construct
  source 1..19: mol_type = other DNA
taggaactggaattgagct

SEQ ID NO: 1804 - DNA, 19 bp, Synthetic construct
  source 1..19: mol_type = other DNA
gatggttaaaggggtggta

SEQ ID NO: 1805 - DNA, 19 bp, Synthetic construct
  source 1..19: mol_type = other DNA
gctacgggaaagtgttgga

SEQ ID NO: 1806 - DNA, 19 bp, Synthetic construct
  source 1..19: mol_type = other DNA
agggcacgaggaggggctg

SEQ ID NO: 1807 - DNA, 19 bp, Synthetic construct
  source 1..19: mol_type = other DNA
tggggatgggggtgaggat

SEQ ID NO: 1808 - DNA, 19 bp, Synthetic construct
  source 1..19: mol_type = other DNA
gcagctggggagagctggc

SEQ ID NO: 1809 - DNA, 19 bp, Synthetic construct
  source 1..19: mol_type = other DNA
gctggggagagctggcgga

SEQ ID NO: 1810 - DNA, 19 bp, Synthetic construct
  source 1..19: mol_type = other DNA
gacgggggaacagatggtg

SEQ ID NO: 1811 - DNA, 19 bp, Synthetic construct
  source 1..19: mol_type = other DNA
gaacagatggtgggaagag

SEQ ID NO: 1812 - DNA, 19 bp, Synthetic construct
  source 1..19: mol_type = other DNA
taggaactggaattgagct

SEQ ID NO: 1813 - DNA, 19 bp, Synthetic construct
  source 1..19: mol_type = other DNA
gatggttaaaggggtggta

SEQ ID NO: 1814 - DNA, 19 bp, Synthetic construct
  source 1..19: mol_type = other DNA
gctacgggaaagtgttgga

SEQ ID NO: 1815 - DNA, 19 bp, Synthetic construct
  source 1..19: mol_type = other DNA
agggcacgaggaggggctg

SEQ ID NO: 1816 - DNA, 19 bp, Synthetic construct
  source 1..19: mol_type = other DNA
tggggatgggggtgaggat

SEQ ID NO: 1817 - DNA, 19 bp, Synthetic construct
  source 1..19: mol_type = other DNA
gcagctggggagagctggc

SEQ ID NO: 1818 - DNA, 19 bp, Synthetic construct
  source 1..19: mol_type = other DNA
gctggggagagctggcgga

SEQ ID NO: 1819 - DNA, 19 bp, Synthetic construct
  source 1..19: mol_type = other DNA
gacgggggaacagatggtg

SEQ ID NO: 1820 - DNA, 19 bp, Synthetic construct
  source 1..19: mol_type = other DNA
gttggctgggaagggtgtg

SEQ ID NO: 1821 - DNA, 19 bp, Synthetic construct
  source 1..19: mol_type = other DNA
taggaactggaattgagct

SEQ ID NO: 1822 - DNA, 19 bp, Synthetic construct
  source 1..19: mol_type = other DNA
ggtgtggttgggtgcagcc

SEQ ID NO: 1823 - DNA, 19 bp, Synthetic construct
  source 1..19: mol_type = other DNA
gctacgggaaagtgttgga

SEQ ID NO: 1824 - DNA, 19 bp, Synthetic construct
  source 1..19: mol_type = other DNA
ggaggacccagcaggaatc

SEQ ID NO: 1825 - DNA, 19 bp, Synthetic construct
  source 1..19: mol_type = other DNA
gagagcctctgctggggac

SEQ ID NO: 1826 - DNA, 19 bp, Synthetic construct
  source 1..19: mol_type = other DNA
acagaaagtctgttggggg

SEQ ID NO: 1827 - DNA, 19 bp, Synthetic construct
  source 1..19: mol_type = other DNA
gtggactgaatttggtgaa

SEQ ID NO: 1828 - DNA, 19 bp, Synthetic construct
  source 1..19: mol_type = other DNA
taggacccagcagggcgtg

SEQ ID NO: 1829 - DNA, 19 bp, Synthetic construct
  source 1..19: mol_type = other DNA
gacaggtaggacccagcag

SEQ ID NO: 1830 - DNA, 19 bp, Synthetic construct
  source 1..19: mol_type = other DNA
ggggagggcagcatccgcc

SEQ ID NO: 1831 - DNA, 19 bp, Synthetic construct
  source 1..19: mol_type = other DNA
ggaggacccagcaggaatc

SEQ ID NO: 1832 - DNA, 19 bp, Synthetic construct
  source 1..19: mol_type = other DNA
gagagcctctgctggggac

SEQ ID NO: 1833 - DNA, 19 bp, Synthetic construct
  source 1..19: mol_type = other DNA
acagaaagtctgttggggg

SEQ ID NO: 1834 - DNA, 19 bp, Synthetic construct
  source 1..19: mol_type = other DNA
gtggactgaatttggtgaa

SEQ ID NO: 1835 - DNA, 19 bp, Synthetic construct
  source 1..19: mol_type = other DNA
taggacccagcagggcgtg

SEQ ID NO: 1836 - DNA, 19 bp, Synthetic construct
  source 1..19: mol_type = other DNA
gacaggtaggacccagcag

SEQ ID NO: 1837 - DNA, 19 bp, Synthetic construct
  source 1..19: mol_type = other DNA
ggggagggcagcatccgcc

SEQ ID NO: 1838 - DNA, 19 bp, Synthetic construct
  source 1..19: mol_type = other DNA
ggaggacccagcaggaatc

SEQ ID NO: 1839 - DNA, 19 bp, Synthetic construct
  source 1..19: mol_type = other DNA
gagagcctctgctggggac

SEQ ID NO: 1840 - DNA, 19 bp, Synthetic construct
  source 1..19: mol_type = other DNA
acagaaagtctgttggggg

SEQ ID NO: 1841 - DNA, 19 bp, Synthetic construct
  source 1..19: mol_type = other DNA
gtggactgaatttggtgaa

SEQ ID NO: 1842 - DNA, 19 bp, Synthetic construct
  source 1..19: mol_type = other DNA
taggacccagcagggcgtg

SEQ ID NO: 1843 - DNA, 19 bp, Synthetic construct
  source 1..19: mol_type = other DNA
tgggtatggagtggagtct

SEQ ID NO: 1844 - DNA, 19 bp, Synthetic construct
  source 1..19: mol_type = other DNA
ggggagggcagcatccgcc

SEQ ID NO: 1845 - DNA, 19 bp, Synthetic construct
  source 1..19: mol_type = other DNA
gtggtatcaaggaggaagt

SEQ ID NO: 1846 - DNA, 19 bp, Synthetic construct
  source 1..19: mol_type = other DNA
gagagcctctgctggggac

SEQ ID NO: 1847 - DNA, 19 bp, Synthetic construct
  source 1..19: mol_type = other DNA
gaatttggtgaagacagaa

SEQ ID NO: 1848 - DNA, 19 bp, Synthetic construct
  source 1..19: mol_type = other DNA
gcaacgcattgtgtaggaa

SEQ ID NO: 1849 - DNA, 19 bp, Synthetic construct
  source 1..19: mol_type = other DNA
taggacccagcagggcgtg

SEQ ID NO: 1850 - DNA, 19 bp, Synthetic construct
  source 1..19: mol_type = other DNA
tgggtatggagtggagtct

SEQ ID NO: 1851 - DNA, 19 bp, Synthetic construct
  source 1..19: mol_type = other DNA
gaggctgtgtgcttctgag

SEQ ID NO: 1852 - DNA, 19 bp, Synthetic construct
  source 1..19: mol_type = other DNA
gtggtatcaaggaggaagt

SEQ ID NO: 1853 - DNA, 19 bp, Synthetic construct
  source 1..19: mol_type = other DNA
gagagcctctgctggggac

SEQ ID NO: 1854 - DNA, 19 bp, Synthetic construct
  source 1..19: mol_type = other DNA
gaatttggtgaagacagaa

SEQ ID NO: 1855 - DNA, 19 bp, Synthetic construct
  source 1..19: mol_type = other DNA
gcaacgcattgtgtaggaa

SEQ ID NO: 1856 - DNA, 19 bp, Synthetic construct
  source 1..19: mol_type = other DNA
gacaggtaggacccagcag

SEQ ID NO: 1857 - DNA, 19 bp, Synthetic construct
  source 1..19: mol_type = other DNA
tgggtatggagtggagtct

SEQ ID NO: 1858 - DNA, 19 bp, Synthetic construct
  source 1..19: mol_type = other DNA
gaggctgtgtgcttctgag

SEQ ID NO: 1859 - DNA, 19 bp, Synthetic construct
  source 1..19: mol_type = other DNA
gtagtcagatggtttgggg

SEQ ID NO: 1860 - DNA, 19 bp, Synthetic construct
  source 1..19: mol_type = other DNA
acagaaagtctgttggggg

SEQ ID NO: 1861 - DNA, 19 bp, Synthetic construct
  source 1..19: mol_type = other DNA
gtggactgaatttggtgaa

SEQ ID NO: 1862 - DNA, 19 bp, Synthetic construct
  source 1..19: mol_type = other DNA
gcaacgcattgtgtaggaa

SEQ ID NO: 1863 - DNA, 19 bp, Synthetic construct
  source 1..19: mol_type = other DNA
gacaggtaggacccagcag

SEQ ID NO: 1864 - DNA, 19 bp, Synthetic construct
  source 1..19: mol_type = other DNA
ggggagggcagcatccgcc

SEQ ID NO: 1865 - DNA, 19 bp, Synthetic construct
  source 1..19: mol_type = other DNA
gaggctgtgtgcttctgag

SEQ ID NO: 1866 - DNA, 19 bp, Synthetic construct
  source 1..19: mol_type = other DNA
gtagtcagatggtttgggg

SEQ ID NO: 1867 - DNA, 19 bp, Synthetic construct
  source 1..19: mol_type = other DNA
acagaaagtctgttggggg

SEQ ID NO: 1868 - DNA, 19 bp, Synthetic construct
  source 1..19: mol_type = other DNA
gtggactgaatttggtgaa

SEQ ID NO: 1869 - DNA, 19 bp, Synthetic construct
  source 1..19: mol_type = other DNA
taggacccagcagggcgtg

SEQ ID NO: 1870 - DNA, 19 bp, Synthetic construct
  source 1..19: mol_type = other DNA
gacaggtaggacccagcag

SEQ ID NO: 1871 - DNA, 19 bp, Synthetic construct
  source 1..19: mol_type = other DNA
ggggagggcagcatccgcc

SEQ ID NO: 1872 - DNA, 19 bp, Synthetic construct
  source 1..19: mol_type = other DNA
gaggctgtgtgcttctgag

SEQ ID NO: 1873 - DNA, 19 bp, Synthetic construct
  source 1..19: mol_type = other DNA
gagagcctctgctggggac

SEQ ID NO: 1874 - DNA, 19 bp, Synthetic construct
  source 1..19: mol_type = other DNA
acagaaagtctgttggggg

SEQ ID NO: 1875 - DNA, 19 bp, Synthetic construct
  source 1..19: mol_type = other DNA
gtggactgaatttggtgaa

SEQ ID NO: 1876 - DNA, 19 bp, Synthetic construct
  source 1..19: mol_type = other DNA
taggacccagcagggcgtg

SEQ ID NO: 1877 - DNA, 19 bp, Synthetic construct
  source 1..19: mol_type = other DNA
gacaggtaggacccagcag

SEQ ID NO: 1878 - DNA, 19 bp, Synthetic construct
  source 1..19: mol_type = other DNA
ggggagggcagcatccgcc

SEQ ID NO: 1879 - DNA, 19 bp, Synthetic construct
  source 1..19: mol_type = other DNA
gaggctgtgtgcttctgag

SEQ ID NO: 1880 - DNA, 18 bp, Synthetic construct
  source 1..18: mol_type = other DNA
gaaaatgacaggtgggcc

SEQ ID NO: 1881 - DNA, 18 bp, Synthetic construct
  source 1..18: mol_type = other DNA
ttggtgtgggagtaggca

SEQ ID NO: 1882 - DNA, 18 bp, Synthetic construct
  source 1..18: mol_type = other DNA
ggtcaggggacgggggaa

SEQ ID NO: 1883 - DNA, 18 bp, Synthetic construct
  source 1..18: mol_type = other DNA
ggctgggaagggtgtgcc

SEQ ID NO: 1884 - DNA, 18 bp, Synthetic construct
  source 1..18: mol_type = other DNA
gttggagggggagaagtc

SEQ ID NO: 1885 - DNA, 18 bp, Synthetic construct
  source 1..18: mol_type = other DNA
ctggaatggcaggaccag

SEQ ID NO: 1886 - DNA, 18 bp, Synthetic construct
  source 1..18: mol_type = other DNA
gccaacggtgtagctgcc

SEQ ID NO: 1887 - DNA, 18 bp, Synthetic construct
  source 1..18: mol_type = other DNA
ggagtctgagaaaaggga

SEQ ID NO: 1888 - DNA, 19 bp, Synthetic construct
  source 1..19: mol_type = other DNA
gcaatttggtgtgggagta

SEQ ID NO: 1889 - DNA, 19 bp, Synthetic construct
  source 1..19: mol_type = other DNA
gaggcatctgggcggaggg

SEQ ID NO: 1890 - DNA, 18 bp, Synthetic construct
  source 1..18: mol_type = other DNA
gaaaatgacaggtgggcc

SEQ ID NO: 1891 - DNA, 18 bp, Synthetic construct
  source 1..18: mol_type = other DNA
gggtgttcagaaacagaa

SEQ ID NO: 1892 - DNA, 18 bp, Synthetic construct
  source 1..18: mol_type = other DNA
ggtcaggggacgggggaa

SEQ ID NO: 1893 - DNA, 18 bp, Synthetic construct
  source 1..18: mol_type = other DNA
ggctgggaagggtgtgcc

SEQ ID NO: 1894 - DNA, 18 bp, Synthetic construct
  source 1..18: mol_type = other DNA
gttggagggggagaagtc

SEQ ID NO: 1895 - DNA, 18 bp, Synthetic construct
  source 1..18: mol_type = other DNA
ctggaatggcaggaccag

SEQ ID NO: 1896 - DNA, 18 bp, Synthetic construct
  source 1..18: mol_type = other DNA
gccaacggtgtagctgcc

SEQ ID NO: 1897 - DNA, 18 bp, Synthetic construct
  source 1..18: mol_type = other DNA
gcatgagactttgaggtg

SEQ ID NO: 1898 - DNA, 19 bp, Synthetic construct
  source 1..19: mol_type = other DNA
gaagtccccagcagaggct

SEQ ID NO: 1899 - DNA, 18 bp, Synthetic construct
  source 1..18: mol_type = other DNA
gaaaatgacaggtgggcc

SEQ ID NO: 1900 - DNA, 18 bp, Synthetic construct
  source 1..18: mol_type = other DNA
gggtgttcagaaacagaa

SEQ ID NO: 1901 - DNA, 18 bp, Synthetic construct
  source 1..18: mol_type = other DNA
ggtcaggggacgggggaa

SEQ ID NO: 1902 - DNA, 18 bp, Synthetic construct
  source 1..18: mol_type = other DNA
gccggtgtggttgggtgc

SEQ ID NO: 1903 - DNA, 18 bp, Synthetic construct
  source 1..18: mol_type = other DNA
gaggacccagcaggaatc

SEQ ID NO: 1904 - DNA, 18 bp, Synthetic construct
  source 1..18: mol_type = other DNA
ctggaatggcaggaccag

SEQ ID NO: 1905 - DNA, 18 bp, Synthetic construct
  source 1..18: mol_type = other DNA
gccaacggtgtagctgcc

SEQ ID NO: 1906 - DNA, 19 bp, Synthetic construct
  source 1..19: mol_type = other DNA
gatactgttgactgtagaa

SEQ ID NO: 1907 - DNA, 19 bp, Synthetic construct
  source 1..19: mol_type = other DNA
gaagtccccagcagaggct

SEQ ID NO: 1908 - DNA, 18 bp, Synthetic construct
  source 1..18: mol_type = other DNA
gaaaatgacaggtgggcc

SEQ ID NO: 1909 - DNA, 18 bp, Synthetic construct
  source 1..18: mol_type = other DNA
gggtgttcagaaacagaa

SEQ ID NO: 1910 - DNA, 18 bp, Synthetic construct
  source 1..18: mol_type = other DNA
ggtcaggggacgggggaa

SEQ ID NO: 1911 - DNA, 18 bp, Synthetic construct
  source 1..18: mol_type = other DNA
gccggtgtggttgggtgc

SEQ ID NO: 1912 - DNA, 18 bp, Synthetic construct
  source 1..18: mol_type = other DNA
gaggacccagcaggaatc

SEQ ID NO: 1913 - DNA, 18 bp, Synthetic construct
  source 1..18: mol_type = other DNA
ctggaatggcaggaccag

SEQ ID NO: 1914 - DNA, 18 bp, Synthetic construct
  source 1..18: mol_type = other DNA
gccaacggtgtagctgcc

SEQ ID NO: 1915 - DNA, 19 bp, Synthetic construct
  source 1..19: mol_type = other DNA
gatactgttgactgtagaa

SEQ ID NO: 1916 - DNA, 19 bp, Synthetic construct
  source 1..19: mol_type = other DNA
gaagtccccagcagaggct

SEQ ID NO: 1917 - DNA, 18 bp, Synthetic construct
  source 1..18: mol_type = other DNA
gaaaatgacaggtgggcc

SEQ ID NO: 1918 - DNA, 18 bp, Synthetic construct
  source 1..18: mol_type = other DNA
gggtgttcagaaacagaa

SEQ ID NO: 1919 - DNA, 18 bp, Synthetic construct
  source 1..18: mol_type = other DNA
ggtcaggggacgggggaa

SEQ ID NO: 1920 - DNA, 18 bp, Synthetic construct
  source 1..18: mol_type = other DNA
gccggtgtggttgggtgc

SEQ ID NO: 1921 - DNA, 18 bp, Synthetic construct
  source 1..18: mol_type = other DNA
gaggacccagcaggaatc

SEQ ID NO: 1922 - DNA, 18 bp, Synthetic construct
  source 1..18: mol_type = other DNA
ggagtggagtctggcaga

SEQ ID NO: 1923 - DNA, 18 bp, Synthetic construct
  source 1..18: mol_type = other DNA
ggagtctgagaaaaggga

SEQ ID NO: 1924 - DNA, 19 bp, Synthetic construct
  source 1..19: mol_type = other DNA
gatactgttgactgtagaa

SEQ ID NO: 1925 - DNA, 19 bp, Synthetic construct
  source 1..19: mol_type = other DNA
gaggcatctgggcggaggg

SEQ ID NO: 1926 - DNA, 18 bp, Synthetic construct
  source 1..18: mol_type = other DNA
gaaaatgacaggtgggcc

SEQ ID NO: 1927 - DNA, 18 bp, Synthetic construct
  source 1..18: mol_type = other DNA
ggggaagctgagggcacg

SEQ ID NO: 1928 - DNA, 18 bp, Synthetic construct
  source 1..18: mol_type = other DNA
ggctgggaagggtgtgcc

SEQ ID NO: 1929 - DNA, 18 bp, Synthetic construct
  source 1..18: mol_type = other DNA
taagttgctacgggaaag

SEQ ID NO: 1930 - DNA, 18 bp, Synthetic construct
  source 1..18: mol_type = other DNA
gacaggtaggacccagca

SEQ ID NO: 1931 - DNA, 18 bp, Synthetic construct
  source 1..18: mol_type = other DNA
ggagtggagtctggcaga

SEQ ID NO: 1932 - DNA, 18 bp, Synthetic construct
  source 1..18: mol_type = other DNA
ggagtctgagaaaaggga

SEQ ID NO: 1933 - DNA, 19 bp, Synthetic construct
  source 1..19: mol_type = other DNA
gactgtagaaggctctgag

SEQ ID NO: 1934 - DNA, 19 bp, Synthetic construct
  source 1..19: mol_type = other DNA
gaggcatctgggcggaggg

SEQ ID NO: 1935 - DNA, 18 bp, Synthetic construct
  source 1..18: mol_type = other DNA
ttggtgtgggagtaggca

SEQ ID NO: 1936 - DNA, 18 bp, Synthetic construct
  source 1..18: mol_type = other DNA
ggggaagctgagggcacg

SEQ ID NO: 1937 - DNA, 18 bp, Synthetic construct
  source 1..18: mol_type = other DNA
ggctgggaagggtgtgcc

SEQ ID NO: 1938 - DNA, 18 bp, Synthetic construct
  source 1..18: mol_type = other DNA
taagttgctacgggaaag

SEQ ID NO: 1939 - DNA, 18 bp, Synthetic construct
  source 1..18: mol_type = other DNA
gacaggtaggacccagca

SEQ ID NO: 1940 - DNA, 18 bp, Synthetic construct
  source 1..18: mol_type = other DNA
gccaacggtgtagctgcc

SEQ ID NO: 1941 - DNA, 18 bp, Synthetic construct
  source 1..18: mol_type = other DNA
ggagtctgagaaaaggga

SEQ ID NO: 1942 - DNA, 19 bp, Synthetic construct
  source 1..19: mol_type = other DNA
gactgtagaaggctctgag

SEQ ID NO: 1943 - DNA, 19 bp, Synthetic construct
  source 1..19: mol_type = other DNA
gaggcatctgggcggaggg

SEQ ID NO: 1944 - DNA, 18 bp, Synthetic construct
  source 1..18: mol_type = other DNA
ttggtgtgggagtaggca

SEQ ID NO: 1945 - DNA, 18 bp, Synthetic construct
  source 1..18: mol_type = other DNA
ggggaagctgagggcacg

SEQ ID NO: 1946 - DNA, 18 bp, Synthetic construct
  source 1..18: mol_type = other DNA
ggctgggaagggtgtgcc

SEQ ID NO: 1947 - DNA, 18 bp, Synthetic construct
  source 1..18: mol_type = other DNA
gttggagggggagaagtc

SEQ ID NO: 1948 - DNA, 18 bp, Synthetic construct
  source 1..18: mol_type = other DNA
gacaggtaggacccagca

SEQ ID NO: 1949 - DNA, 18 bp, Synthetic construct
  source 1..18: mol_type = other DNA
gccaacggtgtagctgcc

SEQ ID NO: 1950 - DNA, 18 bp, Synthetic construct
  source 1..18: mol_type = other DNA
ggagtctgagaaaaggga

SEQ ID NO: 1951 - DNA, 19 bp, Synthetic construct
  source 1..19: mol_type = other DNA
gactgtagaaggctctgag

SEQ ID NO: 1952 - DNA, 19 bp, Synthetic construct
  source 1..19: mol_type = other DNA
gaggcatctgggcggaggg

SEQ ID NO: 1953 - DNA, 18 bp, Synthetic construct
  source 1..18: mol_type = other DNA
gggtgttcagaaacagaa

SEQ ID NO: 1954 - DNA, 18 bp, Synthetic construct
  source 1..18: mol_type = other DNA
ggagtctgagaaaaggga

SEQ ID NO: 1955 - DNA, 18 bp, Synthetic construct
  source 1..18: mol_type = other DNA
gggtgttcagaaacagaa

SEQ ID NO: 1956 - DNA, 18 bp, Synthetic construct
  source 1..18: mol_type = other DNA
gcatgagactttgaggtg

SEQ ID NO: 1957 - DNA, 18 bp, Synthetic construct
  source 1..18: mol_type = other DNA
ggtcaggggacgggggaa

SEQ ID NO: 1958 - DNA, 18 bp, Synthetic construct
  source 1..18: mol_type = other DNA
gcatgagactttgaggtg

SEQ ID NO: 1959 - DNA, 18 bp, Synthetic construct
  source 1..18: mol_type = other DNA
ggctgggaagggtgtgcc

SEQ ID NO: 1960 - DNA, 19 bp, Synthetic construct
  source 1..19: mol_type = other DNA
gcaatttggtgtgggagta

SEQ ID NO: 1961 - DNA, 18 bp, Synthetic construct
  source 1..18: mol_type = other DNA
taagttgctacgggaaag

SEQ ID NO: 1962 - DNA, 19 bp, Synthetic construct
  source 1..19: mol_type = other DNA
gcaatttggtgtgggagta

SEQ ID NO: 1963 - DNA, 18 bp, Synthetic construct
  source 1..18: mol_type = other DNA
ctggaatggcaggaccag

SEQ ID NO: 1964 - DNA, 19 bp, Synthetic construct
  source 1..19: mol_type = other DNA
gaggcatctgggcggaggg

SEQ ID NO: 1965 - DNA, 18 bp, Synthetic construct
  source 1..18: mol_type = other DNA
ctggaatggcaggaccag

SEQ ID NO: 1966 - DNA, 18 bp, Synthetic construct
  source 1..18: mol_type = other DNA
ggagtggagtctggcaga

SEQ ID NO: 1967 - DNA, 19 bp, Synthetic construct
  source 1..19: mol_type = other DNA
gtggtatcaaggaggaagt

SEQ ID NO: 1968 - DNA, 19 bp, Synthetic construct
  source 1..19: mol_type = other DNA
gtagtcagatggtttgggg

SEQ ID NO: 1969 - DNA, 19 bp, Synthetic construct
  source 1..19: mol_type = other DNA
gaatttggtgaagacagaa

SEQ ID NO: 1970 - DNA, 19 bp, Synthetic construct
  source 1..19: mol_type = other DNA
gaggctgtgtgcttctgag

SEQ ID NO: 1971 - DNA, 19 bp, Synthetic construct
  source 1..19: mol_type = other DNA
agggcacgaggaggggctg

SEQ ID NO: 1972 - DNA, 19 bp, Synthetic construct
  source 1..19: mol_type = other DNA
ggagggggagaagtcagag

SEQ ID NO: 1973 - DNA, 19 bp, Synthetic construct
  source 1..19: mol_type = other DNA
tggggatgggggtgaggat

SEQ ID NO: 1974 - DNA, 19 bp, Synthetic construct
  source 1..19: mol_type = other DNA
tgggggtgaggatgggaac

SEQ ID NO: 1975 - DNA, 19 bp, Synthetic construct
  source 1..19: mol_type = other DNA
gaacagatggtgggaagag

SEQ ID NO: 1976 - DNA, 19 bp, Synthetic construct
  source 1..19: mol_type = other DNA
gaacagatggtgggaagag

SEQ ID NO: 1977 - DNA, 19 bp, Synthetic construct
  source 1..19: mol_type = other DNA
gaacagatggtgggaagag

SEQ ID NO: 1978 - DNA, 19 bp, Synthetic construct
  source 1..19: mol_type = other DNA
taggaactggaattgagct

SEQ ID NO: 1979 - DNA, 19 bp, Synthetic construct
  source 1..19: mol_type = other DNA
gatggttaaaggggtggta

SEQ ID NO: 1980 - protein, 179 aa, Synthetic construct
SRPGERPFQCRICMRNFSKKIDLVRHTRTHTGEKPFQCRICMRNFSLKGHLTRHLRTHTGSQKPFQCRICMRNFSRQDNLGRHLRTHTGEKPFQCRICMRNFSVSNTLTRHLKTHTGGGGSQKPFQCRICMRNFSQSAHLKRHLRTHTGEKPFQCRICMRNFSRSDHLSLHLKTHLRGS

SEQ ID NO: 1981 - protein, 179 aa, Synthetic construct
SRPGERPFQCRICMRNFSRKEHLSIHLRTHTGEKPFQCRICMRNFSDKSHLTRHLKTHTGGGGSQKPFQCRICMRNFSDGSTLRRHTRTHTGEKPFQCRICMRNFSLSQTLKRHLRTHTGSQKPFQCRICMRNFSQRSDLTRHLRTHTGEKPFQCRICMRNFSQSAHLGRHLKTHLRGS

SEQ ID NO: 1982 - protein, 179 aa, Synthetic construct
SRPGERPFQCRICMRNFSHRTNLIAHTRTHTGEKPFQCRICMRNFSRREHLVRHLRTHTGSQKPFQCRICMRNFSVPHNLQRHLRTHTGEKPFQCRICMRNFSRVDNLGRHLKTHTGGGGSQKPFQCRICMRNFSRKHHLGRHTRTHTGEKPFQCRICMRNFSRREHLTIHLRTHLRGS

SEQ ID NO: 1983 - protein, 179 aa, Synthetic construct
SRPGERPFQCRICMRNFSSPSKLARHTRTHTGEKPFQCRICMRNFSQRSDLTRHLRTHTGGGGSQKPFQCRICMRNFSRQANLTRHTRTHTGEKPFQCRICMRNFSRQEHLVRHLRTHTGSQKPFQCRICMRNFSQRSDLTRHLRTHTGEKPFQCRICMRNFSQGGTLRRHLKTHLRGS

SEQ ID NO: 1984 - protein, 179 aa, Synthetic construct
SRPGERPFQCRICMRNFSQSAHLKRHLRTHTGEKPFQCRICMRNFSESGHLKRHLKTHTGGGGSQKPFQCRICMRNFSFHSYLQKHLRTHTGEKPFQCRICMRNFSRRDNLLRHLKTHTGSQKPFQCRICMRNFSKKDHLHRHTRTHTGEKPFQCRICMRNFSLSQTLNRHLRTHLRGS

SEQ ID NO: 1985 - protein, 179 aa, Synthetic construct
SRPGERPFQCRICMRNFSRTFVLKRHTRTHTGEKPFQCRICMRNFSRNDALAVHLRTHTGSQKPFQCRICMRNFSQRRYLVEHTRTHTGEKPFQCRICMRNFSQQTNLARHLRTHTGGGGSQKPFQCRICMRNFSRREHLVRHLRTHTGEKPFQCRICMRNFSDPSNLQRHLKTHLRGS

SEQ ID NO: 1986 - protein, 179 aa, Synthetic construct
SRPGERPFQCRICMRNFSRREVLENHLRTHTGEKPFQCRICMRNFSIKHHLGRHLKTHTGGGGSQKPFQCRICMRNFSQQTNLTRHLRTHTGEKPFQCRICMRNFSRSDHLSLHLKTHTGSQKPFQCRICMRNFSVPSKLLRHTRTHTGEKPFQCRICMRNFSTNSSLTRHLRTHLRGS

SEQ ID NO: 1987 - protein, 179 aa, Synthetic construct
SRPGERPFQCRICMRNFSTNSMLARHTRTHTGEKPFQCRICMRNFSQNEHLKVHLRTHTGGGGSQKPFQCRICMRNFSQGGNLTRHLRTHTGEKPFQCRICMRNFSRKMTLMAHLKTHTGSQKPFQCRICMRNFSQQTNLTRHLRTHTGEKPFQCRICMRNFSRIDHLAGHLKTHLRGS

SEQ ID NO: 1988 - protein, 179 aa, Synthetic construct
SRPGERPFQCRICMRNFSDLSTLRRHTRTHTGEKPFQCRICMRNFSQSTTLKRHLRTHTGGGGSQKPFQCRICMRNFSRREHLVRHLRTHTGEKPFQCRICMRNFSINHSLRRHLKTHTGSQKPFQCRICMRNFSRREVLENHLRTHTGEKPFQCRICMRNFSIRHHLKRHLKTHLRGS

SEQ ID NO: 1989 - protein, 179 aa, Synthetic construct
SRPGERPFQCRICMRNFSRQDNLGRHLRTHTGEKPFQCRICMRNFSTNHWLLIHLKTHTGGGGSQKPFQCRICMRNFSQATNLARHLRTHTGEKPFQCRICMRNFSQNSHLRRHLKTHTGSQKPFQCRICMRNFSRREHLMRHLRTHTGEKPFQCRICMRNFSQNSHLRRHLKTHLRGS

SEQ ID NO: 1990 - protein, 179 aa, Synthetic construct
SRPGERPFQCRICMRNFSKKIDLVRHTRTHTGEKPFQCRICMRNFSLKGHLTRHLRTHTGSQKPFQCRICMRNFSRQDNLGRHLRTHTGEKPFQCRICMRNFSVSNTLSRHLKTHTGGGGSQKPFQCRICMRNFSQSAHLKRHLRTHTGEKPFQCRICMRNFSRSDHLSLHLKTHLRGS

SEQ ID NO: 1991 - protein, 179 aa, Synthetic construct
SRPGERPFQCRICMRNFSRKEHLSIHLRTHTGEKPFQCRICMRNFSDKSHLTRHLKTHTGGGGSQKPFQCRICMRNFSDGSTLRRHTRTHTGEKPFQCRICMRNFSLSQTLKRHLRTHTGSQKPFQCRICMRNFSVEASLKRHLRTHTGEKPFQCRICMRNFSQTTHLSRHLKTHLRGS

SEQ ID NO: 1992 - protein, 179 aa, Synthetic construct
SRPGERPFQCRICMRNFSHRTNLIAHTRTHTGEKPFQCRICMRNFSRREHLVRHLRTHTGSQKPFQCRICMRNFSVNHNLRRHLRTHTGEKPFQCRICMRNFSRQDNLQRHLKTHTGGGGSQKPFQCRICMRNFSRKHHLGRHTRTHTGEKPFQCRICMRNFSRREHLTIHLRTHLRGS

SEQ ID NO: 1993 - protein, 179 aa, Synthetic construct
SRPGERPFQCRICMRNFSAPSKLARHTRTHTGEKPFQCRICMRNFSVKHSLQRHLRTHTGGGGSQKPFQCRICMRNFSRQANLTRHTRTHTGEKPFQCRICMRNFSRQEHLVRHLRTHTGSQKPFQCRICMRNFSLRDSLKRHLRTHTGEKPFQCRICMRNFSQTATLKRHLKTHLRGS

SEQ ID NO: 1994 - protein, 179 aa, Synthetic construct
SRPGERPFQCRICMRNFSRSRNLLLHTRTHTGEKPFQCRICMRNFSQSAHLKRHLRTHTGSQKPFQCRICMRNFSSPSKLARHTRTHTGEKPFQCRICMRNFSVKETLTRHLRTHTGGGGSQKPFQCRICMRNFSRPHNLLRHTRTHTGEKPFQCRICMRNFSRREHLVRHLRTHLRGS

SEQ ID NO: 1995 - protein, 179 aa, Synthetic construct
SRPGERPFQCRICMRNFSRTFVLKRHTRTHTGEKPFQCRICMRNFSRNDALAVHLRTHTGSQKPFQCRICMRNFSKRFNLMQHTRTHTGEKPFQCRICMRNFSQTQNLTRHLRTHTGGGGSQKPFQCRICMRNFSRREHLVRHLRTHTGEKPFQCRICMRNFSDMGNLGRHLKTHLRGS

SEQ ID NO: 1996 - protein, 179 aa, Synthetic construct
SRPGERPFQCRICMRNFSRNFILQRHTRTHTGEKPFQCRICMRNFSEAHHLSRHLRTHTGGGGSQKPFQCRICMRNFSQQTNLTRHLRTHTGEKPFQCRICMRNFSRSDHLSLHLKTHTGSQKPFQCRICMRNFSAPSKLKRHTRTHTGEKPFQCRICMRNFSTNSSLTRHLRTHLRGS

SEQ ID NO: 1997 - protein, 179 aa, Synthetic construct
SRPGERPFQCRICMRNFSHHTSLVRHTRTHTGEKPFQCRICMRNFSQREHLKVHLRTHTGGGGSQKPFQCRICMRNFSQRGNLARHLRTHTGEKPFQCRICMRNFSRNHSLRMHLKTHTGSQKPFQCRICMRNFSQQTNLTRHLRTHTGEKPFQCRICMRNFSRIDHLAGHLKTHLRGS

SEQ ID NO: 1998 - protein, 179 aa, Synthetic construct
SRPGERPFQCRICMRNFSDPSTLRRHTRTHTGEKPFQCRICMRNFSQSTTLKRHLRTHTGGGGSQKPFQCRICMRNFSRREHLVRHLRTHTGEKPFQCRICMRNFSINHSLRRHLKTHTGSQKPFQCRICMRNFSRREVLENHLRTHTGEKPFQCRICMRNFSIRHHLKRHLKTHLRGS

SEQ ID NO: 1999 - protein, 179 aa, Synthetic construct
SRPGERPFQCRICMRNFSRADNLGRHLRTHTGEKPFQCRICMRNFSTKQWTLGHLKTHTGGGGSQKPFQCRICMRNFSQQTNLTRHLRTHTGEKPFQCRICMRNFSQTTHLSRHLKTHTGSQKPFQCRICMRNFSKKDHLHRHTRTHTGEKPFQCRICMRNFSQSAHLKRHLRTHLRGS

SEQ ID NO: 2000 - protein, 179 aa, Synthetic construct
SRPGERPFQCRICMRNFSKKIDLVRHTRTHTGEKPFQCRICMRNFSLKGHLTRHLRTHTGSQKPFQCRICMRNFSRQDNLGRHLRTHTGEKPFQCRICMRNFSLKHDLRRHLKTHTGGGGSQKPFQCRICMRNFSQSAHLKRHLRTHTGEKPFQCRICMRNFSRSDHLSLHLKTHLRGS

SEQ ID NO: 2001 - protein, 179 aa, Synthetic construct
SRPGERPFQCRICMRNFSRKEHLSIHLRTHTGEKPFQCRICMRNFSDKSHLTRHLKTHTGGGGSQKPFQCRICMRNFSDPSTLRRHTRTHTGEKPFQCRICMRNFSLRDSLKRHLRTHTGSQKPFQCRICMRNFSQRSDLTRHLRTHTGEKPFQCRICMRNFSQSAHLGRHLKTHLRGS

SEQ ID NO: 2002 - protein, 179 aa, Synthetic construct
SRPGERPFQCRICMRNFSDHSSLKRHLRTHTGEKPFQCRICMRNFSQSPHLQRHLKTHTGGGGSQKPFQCRICMRNFSHRTNLIAHTRTHTGEKPFQCRICMRNFSRREHLVRHLRTHTGSQKPFQCRICMRNFSVNHNLRRHLRTHTGEKPFQCRICMRNFSRQDNLQRHLKTHLRGS

SEQ ID NO: 2003 - protein, 179 aa, Synthetic construct
SRPGERPFQCRICMRNFSAPSKLARHTRTHTGEKPFQCRICMRNFSVKHSLQRHLRTHTGGGGSQKPFQCRICMRNFSKLTNLARHTRTHTGEKPFQCRICMRNFSRREHLVRHLRTHTGSQKPFQCRICMRNFSTKQVLDRHTRTHTGEKPFQCRICMRNFSQSTTLKRHLRTHLRGS

SEQ ID NO: 2004 - protein, 179 aa, Synthetic construct
SRPGERPFQCRICMRNFSRSRNLLLHTRTHTGEKPFQCRICMRNFSQSAHLKRHLRTHTGSQKPFQCRICMRNFSSPSKLARHTRTHTGEKPFQCRICMRNFSVKETLTRHLRTHTGGGGSQKPFQCRICMRNFSRNTNLTRHTRTHTGEKPFQCRICMRNFSRREHLVRHLRTHLRGS

SEQ ID NO: 2005 - protein, 179 aa, Synthetic construct
SRPGERPFQCRICMRNFSRGTVLRRHTRTHTGEKPFQCRICMRNFSRNDALAVHLRTHTGSQKPFQCRICMRNFSKRFNLMQHTRTHTGEKPFQCRICMRNFSQTQNLTRHLRTHTGGGGSQKPFQCRICMRNFSRREHLVRHLRTHTGEKPFQCRICMRNFSDGGNLGRHLKTHLRGS

SEQ ID NO: 2006 - protein, 179 aa, Synthetic construct
SRPGERPFQCRICMRNFSRNFILQRHTRTHTGEKPFQCRICMRNFSEAHHLSRHLRTHTGGGGSQKPFQCRICMRNFSQAVNLARHLRTHTGEKPFQCRICMRNFSRSDHLSLHLKTHTGSQKPFQCRICMRNFSVPSKLLRHTRTHTGEKPFQCRICMRNFSTNSSLTRHLRTHLRGS

SEQ ID NO: 2007 - protein, 179 aa, Synthetic construct
SRPGERPFQCRICMRNFSQRSSLVRHLRTHTGEKPFQCRICMRNFSRTVALNRHLKTHTGSQKPFQCRICMRNFSKGDHLRRHTRTHTGEKPFQCRICMRNFSQRCNLLTHLRTHTGGGGSQKPFQCRICMRNFSLPHHLKRHLRTHTGEKPFQCRICMRNFSISHNLARHLKTHLRGS

SEQ ID NO: 2008 - protein, 179 aa, Synthetic construct
SRPGERPFQCRICMRNFSRNITLVRHTRTHTGEKPFQCRICMRNFSVKETLVRHLRTHTGSQKPFQCRICMRNFSHKSSLTRHLRTHTGEKPFQCRICMRNFSQSGNLKGHLKTHTGGGGSQKPFQCRICMRNFSDSSVLRRHLRTHTGEKPFQCRICMRNFSQGGTLRRHLKTHLRGS

SEQ ID NO: 2009 - protein, 179 aa, Synthetic construct
SRPGERPFQCRICMRNFSQSASLRRHLRTHTGEKPFQCRICMRNFSRRDNLTRHLKTHTGGGGSQKPFQCRICMRNFSDHSSLKRHLRTHTGEKPFQCRICMRNFSQHPNLTRHLKTHTGSQKPFQCRICMRNFSQSAHLKRHLRTHTGEKPFQCRICMRNFSRTEHLARHLKTHLRGS

SEQ ID NO: 2010 - protein, 179 aa, Synthetic construct
SRPGERPFQCRICMRNFSRREHLVRHLRTHTGEKPFQCRICMRNFSQTTHLRRHLKTHTGGGGSQKPFQCRICMRNFSKKIDLVRHTRTHTGEKPFQCRICMRNFSLKGHLTRHLRTHTGSQKPFQCRICMRNFSRQDNLGRHLRTHTGEKPFQCRICMRNFSLKHDLRRHLKTHLRGS

SEQ ID NO: 2011 - protein, 179 aa, Synthetic construct
SRPGERPFQCRICMRNFSRREHLTIHLRTHTGEKPFQCRICMRNFSEKSHLTRHLKTHTGGGGSQKPFQCRICMRNFSDGSTLRRHTRTHTGEKPFQCRICMRNFSLSQTLKRHLRTHTGSQKPFQCRICMRNFSVKHSLQRHLRTHTGEKPFQCRICMRNFSQTTHLSRHLKTHLRGS

SEQ ID NO: 2012 - protein, 179 aa, Synthetic construct
SRPGERPFQCRICMRNFSDRSSLKRHLRTHTGEKPFQCRICMRNFSQTAHLHRHLKTHTGGGGSQKPFQCRICMRNFSHRTNLIAHTRTHTGEKPFQCRICMRNFSRREHLVRHLRTHTGSQKPFQCRICMRNFSVPHNLQRHLRTHTGEKPFQCRICMRNFSRVDNLGRHLKTHLRGS

SEQ ID NO: 2013 - protein, 179 aa, Synthetic construct
SRPGERPFQCRICMRNFSQSAHLKRHLRTHTGEKPFQCRICMRNFSESGHLRRHLKTHTGGGGSQKPFQCRICMRNFSFHSYLQKHLRTHTGEKPFQCRICMRNFSRRDNLLRHLKTHTGSQKPFQCRICMRNFSKKDHLHRHTRTHTGEKPFQCRICMRNFSLSQTLNRHLRTHLRGS

SEQ ID NO: 2014 - protein, 179 aa, Synthetic construct
SRPGERPFQCRICMRNFSRTRNLVMHTRTHTGEKPFQCRICMRNFSQSAHLKRHLRTHTGSQKPFQCRICMRNFSSPSKLARHTRTHTGEKPFQCRICMRNFSVKETLTRHLRTHTGGGGSQKPFQCRICMRNFSRQANLVRHTRTHTGEKPFQCRICMRNFSRQEHLVRHLRTHLRGS

SEQ ID NO: 2015 - protein, 179 aa, Synthetic construct
SRPGERPFQCRICMRNFSRGTVLRRHTRTHTGEKPFQCRICMRNFSRNDALAVHLRTHTGSQKPFQCRICMRNFSTTFNLRVHTRTHTGEKPFQCRICMRNFSQTQNLTRHLRTHTGGGGSQKPFQCRICMRNFSRREHLVRHLRTHTGEKPFQCRICMRNFSDPSNLQRHLKTHLRGS

SEQ ID NO: 2016 - protein, 179 aa, Synthetic construct
SRPGERPFQCRICMRNFSRRFILSRHTRTHTGEKPFQCRICMRNFSEAHHLSRHLRTHTGGGGSQKPFQCRICMRNFSQKVNLARHLRTHTGEKPFQCRICMRNFSRSDHLSLHLKTHTGSQKPFQCRICMRNFSVPSKLLRHTRTHTGEKPFQCRICMRNFSTNSSLTRHLRTHLRGS

SEQ ID NO: 2017 - protein, 179 aa, Synthetic construct
SRPGERPFQCRICMRNFSQRSSLVRHLRTHTGEKPFQCRICMRNFSRTVALNRHLKTHTGSQKPFQCRICMRNFSKKDHLHRHTRTHTGEKPFQCRICMRNFSQKENLQVHLRTHTGGGGSQKPFQCRICMRNFSLPHHLKRHLRTHTGEKPFQCRICMRNFSISHNLARHLKTHLRGS

SEQ ID NO: 2018 - protein, 179 aa, Synthetic construct
SRPGERPFQCRICMRNFSRGITLTRHTRTHTGEKPFQCRICMRNFSVRETLVRHLRTHTGSQKPFQCRICMRNFSHKSSLTRHLRTHTGEKPFQCRICMRNFSQQGNLQLHLKTHTGGGGSQKPFQCRICMRNFSDLSTLRRHTRTHTGEKPFQCRICMRNFSQSTTLKRHLRTHLRGS

SEQ ID NO: 2019 - protein, 179 aa, Synthetic construct
SRPGERPFQCRICMRNFSQSASLRRHLRTHTGEKPFQCRICMRNFSRRDNLTRHLKTHTGGGGSQKPFQCRICMRNFSDPSSLKRHLRTHTGEKPFQCRICMRNFSQHPNLTRHLKTHTGSQKPFQCRICMRNFSQSAHLKRHLRTHTGEKPFQCRICMRNFSRDDKLAGHLKTHLRGS

SEQ ID NO: 2020 - protein, 179 aa, Synthetic construct
SRPGERPFQCRICMRNFSKKDHLHRHTRTHTGEKPFQCRICMRNFSQSAHLKRHLRTHTGGGGSQKPFQCRICMRNFSKKIDLVRHTRTHTGEKPFQCRICMRNFSLKGHLTRHLRTHTGSQKPFQCRICMRNFSRQDNLGRHLRTHTGEKPFQCRICMRNFSVSNTLSRHLKTHLRGS

SEQ ID NO: 2021 - protein, 179 aa, Synthetic construct
SRPGERPFQCRICMRNFSRKEHLSIHLRTHTGEKPFQCRICMRNFSDKSHLTRHLKTHTGGGGSQKPFQCRICMRNFSDLSTLRRHTRTHTGEKPFQCRICMRNFSLSQTLKRHLRTHTGSQKPFQCRICMRNFSVEASLKRHLRTHTGEKPFQCRICMRNFSQTTHLSRHLKTHLRGS

SEQ ID NO: 2022 - protein, 179 aa, Synthetic construct
SRPGERPFQCRICMRNFSDHSSLKRHLRTHTGEKPFQCRICMRNFSQSPHLQRHLKTHTGGGGSQKPFQCRICMRNFSHRTNLIAHTRTHTGEKPFQCRICMRNFSRREHLVRHLRTHTGSQKPFQCRICMRNFSVNHNLTRHLRTHTGEKPFQCRICMRNFSRRDNLNRHLKTHLRGS

SEQ ID NO: 2023 - protein, 179 aa, Synthetic construct
SRPGERPFQCRICMRNFSQSAHLKRHLRTHTGEKPFQCRICMRNFSESGHLRRHLKTHTGGGGSQKPFQCRICMRNFSSFQSYLEHLRTHTGEKPFQCRICMRNFSSRRDNLLHLKTHTGSQKPFQCRICMRNFSKKDHLHRHTRTHTGEKPFQCRICMRNFSLSQTLNRHLRTHLRGS

SEQ ID NO: 2024 - protein, 179 aa, Synthetic construct
SRPGERPFQCRICMRNFSRSRNLLLHTRTHTGEKPFQCRICMRNFSQSAHLKRHLRTHTGSQKPFQCRICMRNFSSPSKLARHTRTHTGEKPFQCRICMRNFSVKETLTRHLRTHTGGGGSQKPFQCRICMRNFSRQANLVRHTRTHTGEKPFQCRICMRNFSRQEHLVRHLRTHLRGS

SEQ ID NO: 2025 - protein, 179 aa, Synthetic construct
SRPGERPFQCRICMRNFSRQANLVRHTRTHTGEKPFQCRICMRNFSQQTNLTRHLRTHTGGGGSQKPFQCRICMRNFSRGTVLRRHTRTHTGEKPFQCRICMRNFSRNDALAVHLRTHTGSQKPFQCRICMRNFSQRRYLVEHTRTHTGEKPFQCRICMRNFSQQTNLARHLRTHLRGS

SEQ ID NO: 2026 - protein, 179 aa, Synthetic construct
SRPGERPFQCRICMRNFSRNFILQRHTRTHTGEKPFQCRICMRNFSEAHHLSRHLRTHTGGGGSQKPFQCRICMRNFSQAVNLARHLRTHTGEKPFQCRICMRNFSRSDHLSLHLKTHTGSQKPFQCRICMRNFSAPSKLKRHTRTHTGEKPFQCRICMRNFSTNSSLTRHLRTHLRGS

SEQ ID NO: 2027 - protein, 179 aa, Synthetic construct
SRPGERPFQCRICMRNFSQSSSLVRHLRTHTGEKPFQCRICMRNFSRKERLATHLKTHTGSQKPFQCRICMRNFSKGDHLRRHTRTHTGEKPFQCRICMRNFSQRCNLLTHLRTHTGGGGSQKPFQCRICMRNFSTGQKLIVHTRTHTGEKPFQCRICMRNFSVVHNLKRHLRTHLRGS

SEQ ID NO: 2028 - protein, 179 aa, Synthetic construct
SRPGERPFQCRICMRNFSRGITLTRHTRTHTGEKPFQCRICMRNFSVRETLVRHLRTHTGSQKPFQCRICMRNFSHKSSLTRHLRTHTGEKPFQCRICMRNFSQSGNLKGHLKTHTGGGGSQKPFQCRICMRNFSDSSVLRRHLRTHTGEKPFQCRICMRNFSQGGTLRRHLKTHLRGS

SEQ ID NO: 2029 - protein, 179 aa, Synthetic construct
SRPGERPFQCRICMRNFSQQQALVRHTRTHTGEKPFQCRICMRNFSRQDNLGRHLRTHTGGGGSQKPFQCRICMRNFSDPSSLKRHLRTHTGEKPFQCRICMRNFSQHPNLTRHLKTHTGSQKPFQCRICMRNFSQSAHLKRHLRTHTGEKPFQCRICMRNFSRDDKLAGHLKTHLRGS

SEQ ID NO: 2030 - protein, 179 aa, Synthetic construct
SRPGERPFQCRICMRNFSRREHLMRHLRTHTGEKPFQCRICMRNFSQNSHLRRHLKTHTGGGGSQKPFQCRICMRNFSKKIDLVRHTRTHTGEKPFQCRICMRNFSLKGHLTRHLRTHTGSQKPFQCRICMRNFSRRDNLGRHLRTHTGEKPFQCRICMRNFSVSNTLTRHLKTHLRGS

SEQ ID NO: 2031 - protein, 179 aa, Synthetic construct
SRPGERPFQCRICMRNFSRKEHLVGHLRTHTGEKPFQCRICMRNFSEKSHLTRHLKTHTGGGGSQKPFQCRICMRNFSDPSTLRRHTRTHTGEKPFQCRICMRNFSLRDSLKRHLRTHTGSQKPFQCRICMRNFSQRSDLTRHLRTHTGEKPFQCRICMRNFSQSAHLGRHLKTHLRGS

SEQ ID NO: 2032 - protein, 179 aa, Synthetic construct
SRPGERPFQCRICMRNFSAPSKLLRHTRTHTGEKPFQCRICMRNFSLRDSLKRHLRTHTGGGGSQKPFQCRICMRNFSRQANLTRHTRTHTGEKPFQCRICMRNFSRQEHLVRHLRTHTGSQKPFQCRICMRNFSQRSDLTRHLRTHTGEKPFQCRICMRNFSQGGTLRRHLKTHLRGS

SEQ ID NO: 2033 - protein, 179 aa, Synthetic construct
SRPGERPFQCRICMRNFSQSAHLKRHLRTHTGEKPFQCRICMRNFSESGHLKRHLKTHTGGGGSQKPFQCRICMRNFSFFSYLKKHLRTHTGEKPFQCRICMRNFSRRDNLLRHLKTHTGSQKPFQCRICMRNFSRREHLVRHLRTHTGEKPFQCRICMRNFSVKNTLTRHLKTHLRGS

SEQ ID NO: 2034 - protein, 179 aa, Synthetic construct
SRPGERPFQCRICMRNFSRTRNLVMHTRTHTGEKPFQCRICMRNFSQSAHLKRHLRTHTGSQKPFQCRICMRNFSAPSKLLRHTRTHTGEKPFQCRICMRNFSLRDSLKRHLRTHTGGGGSQKPFQCRICMRNFSRNTNLTRHTRTHTGEKPFQCRICMRNFSRREHLVRHLRTHLRGS

SEQ ID NO: 2035 - protein, 179 aa, Synthetic construct
SRPGERPFQCRICMRNFSRQANLVRHTRTHTGEKPFQCRICMRNFSQAGNLSRHLRTHTGGGGSQKPFQCRICMRNFSRNFILQRHTRTHTGEKPFQCRICMRNFSRNDVLQSHLRTHTGSQKPFQCRICMRNFSTTFNLRVHTRTHTGEKPFQCRICMRNFSQTQNLTRHLRTHLRGS

SEQ ID NO: 2036 - protein, 179 aa, Synthetic construct
SRPGERPFQCRICMRNFSTNSMLARHTRTHTGEKPFQCRICMRNFSQNEHLKVHLRTHTGGGGSQKPFQCRICMRNFSQRSNLARHTRTHTGEKPFQCRICMRNFSRKESLDVHLRTHTGSQKPFQCRICMRNFSQQTNLTRHLRTHTGEKPFQCRICMRNFSRIDHLAGHLKTHLRGS

SEQ ID NO: 2037 - protein, 179 aa, Synthetic construct
SRPGERPFQCRICMRNFSQRSSLVRHLRTHTGEKPFQCRICMRNFSRTVALNRHLKTHTGSQKPFQCRICMRNFSKGDHLRRHTRTHTGEKPFQCRICMRNFSQRCNLLTHLRTHTGGGGSQKPFQCRICMRNFSTGQKLIVHTRTHTGEKPFQCRICMRNFSVVHNLKRHLRTHLRGS

SEQ ID NO: 2038 - protein, 179 aa, Synthetic construct
SRPGERPFQCRICMRNFSRSTHLRVHTRTHTGEKPFQCRICMRNFSHKSSLTRHLRTHTGGGGSQKPFQCRICMRNFSRQDNLHTHLRTHTGEKPFQCRICMRNFSQRVHLRRHLKTHTGSQKPFQCRICMRNFSRNITLVRHTRTHTGEKPFQCRICMRNFSVKETLVRHLRTHLRGS

SEQ ID NO: 2039 - protein, 179 aa, Synthetic construct
SRPGERPFQCRICMRNFSRSESLTIHLRTHTGEKPFQCRICMRNFSRQGHLKRHLKTHTGSQKPFQCRICMRNFSRPENLNRHLRTHTGEKPFQCRICMRNFSRRDNLNRHLKTHTGGGGSQKPFQCRICMRNFSQGGTLSRHLRTHTGEKPFQCRICMRNFSRHYRLSTHLKTHLRGS

SEQ ID NO: 2040 - protein, 179 aa, Synthetic construct
SRPGERPFQCRICMRNFSVPHNLQRHLRTHTGEKPFQCRICMRNFSRVDNLGRHLKTHTGGGGSQKPFQCRICMRNFSRVDHLHRHLRTHTGEKPFQCRICMRNFSRSDHLSLHLKTHTGSQKPFQCRICMRNFSQSAHLKRHLRTHTGEKPFQCRICMRNFSRSDHLSLHLKTHLRGS

SEQ ID NO: 2041 - protein, 179 aa, Synthetic construct
SRPGERPFQCRICMRNFSSPSKLARHTRTHTGEKPFQCRICMRNFSQRSDLTRHLRTHTGGGGSQKPFQCRICMRNFSKLTNLARHTRTHTGEKPFQCRICMRNFSRREHLVRHLRTHTGSQKPFQCRICMRNFSQRSDLTRHLRTHTGEKPFQCRICMRNFSQGGTLRRHLKTHLRGS

SEQ ID NO: 2042 - protein, 179 aa, Synthetic construct
SRPGERPFQCRICMRNFSQSAHLKRHLRTHTGEKPFQCRICMRNFSEKSHLKRHLKTHTGGGGSQKPFQCRICMRNFSFHSYLQKHLRTHTGEKPFQCRICMRNFSRRDNLLRHLKTHTGSQKPFQCRICMRNFSRREHLVRHLRTHTGEKPFQCRICMRNFSVKNTLTRHLKTHLRGS

SEQ ID NO: 2043 - protein, 179 aa, Synthetic construct
SRPGERPFQCRICMRNFSRGTVLRRHTRTHTGEKPFQCRICMRNFSRNDALAVHLRTHTGSQKPFQCRICMRNFSQRRYLVEHTRTHTGEKPFQCRICMRNFSQQTNLARHLRTHTGGGGSQKPFQCRICMRNFSRREHLVRHLRTHTGEKPFQCRICMRNFSDGGNLGRHLKTHLRGS

SEQ ID NO: 2044 - protein, 179 aa, Synthetic construct
SRPGERPFQCRICMRNFSRQANLVRHTRTHTGEKPFQCRICMRNFSQAGNLSRHLRTHTGGGGSQKPFQCRICMRNFSRNFILQRHTRTHTGEKPFQCRICMRNFSRNDVLQSHLRTHTGSQKPFQCRICMRNFSQRRYLVEHTRTHTGEKPFQCRICMRNFSQQTNLARHLRTHLRGS

SEQ ID NO: 2045 - protein, 179 aa, Synthetic construct
SRPGERPFQCRICMRNFSHHTSLVRHTRTHTGEKPFQCRICMRNFSQREHLKVHLRTHTGGGGSQKPFQCRICMRNFSQRGNLARHLRTHTGEKPFQCRICMRNFSRNHSLRMHLKTHTGSQKPFQCRICMRNFSQQTNLTRHLRTHTGEKPFQCRICMRNFSRPESLAPHLKTHLRGS

SEQ ID NO: 2046 - protein, 179 aa, Synthetic construct
SRPGERPFQCRICMRNFSQRSSLVRHLRTHTGEKPFQCRICMRNFSRTVALNRHLKTHTGSQKPFQCRICMRNFSKGDHLRRHTRTHTGEKPFQCRICMRNFSQRCNLLTHLRTHTGGGGSQKPFQCRICMRNFSIPNHLARHTRTHTGEKPFQCRICMRNFSVRHNLTRHLRTHLRGS

SEQ ID NO: 2047 - protein, 179 aa, Synthetic construct
SRPGERPFQCRICMRNFSQSAHLKRHLRTHTGEKPFQCRICMRNFSHHNSLTRHLKTHTGGGGSQKPFQCRICMRNFSRQDNLHTHLRTHTGEKPFQCRICMRNFSQNSHLRRHLKTHTGSQKPFQCRICMRNFSRNITLVRHTRTHTGEKPFQCRICMRNFSVKETLVRHLRTHLRGS

SEQ ID NO: 2048 - protein, 179 aa, Synthetic construct
SRPGERPFQCRICMRNFSRSESLTIHLRTHTGEKPFQCRICMRNFSRQGHLKRHLKTHTGSQKPFQCRICMRNFSRPENLNRHLRTHTGEKPFQCRICMRNFSRRDNLNRHLKTHTGGGGSQKPFQCRICMRNFSQSGTLKRHLRTHTGEKPFQCRICMRNFSRPYVLSYHLKTHLRGS

SEQ ID NO: 2049 - protein, 179 aa, Synthetic construct
SRPGERPFQCRICMRNFSVNHNLRRHLRTHTGEKPFQCRICMRNFSRQDNLQRHLKTHTGGGGSQKPFQCRICMRNFSRVDHLHRHLRTHTGEKPFQCRICMRNFSRSDHLSLHLKTHTGSQKPFQCRICMRNFSQSAHLKRHLRTHTGEKPFQCRICMRNFSRSDHLSLHLKTHLRGS

SEQ ID NO: 2050 - protein, 179 aa, Synthetic construct
SRPGERPFQCRICMRNFSAPSKLLRHTRTHTGEKPFQCRICMRNFSLRDSLKRHLRTHTGGGGSQKPFQCRICMRNFSKLTNLARHTRTHTGEKPFQCRICMRNFSRREHLVRHLRTHTGSQKPFQCRICMRNFSTKQVLDRHTRTHTGEKPFQCRICMRNFSQSTTLKRHLRTHLRGS

SEQ ID NO: 2051 - protein, 179 aa, Synthetic construct
SRPGERPFQCRICMRNFSQSAHLKRHLRTHTGEKPFQCRICMRNFSESGHLKRHLKTHTGGGGSQKPFQCRICMRNFSSFQSYLEHLRTHTGEKPFQCRICMRNFSSRRDNLLHLKTHTGSQKPFQCRICMRNFSKKDHLHRHTRTHTGEKPFQCRICMRNFSLSQTLNRHLRTHLRGS

SEQ ID NO: 2052 - protein, 179 aa, Synthetic construct
SRPGERPFQCRICMRNFSRNFILQRHTRTHTGEKPFQCRICMRNFSRNDVLQSHLRTHTGSQKPFQCRICMRNFSQRRYLVEHTRTHTGEKPFQCRICMRNFSQQTNLARHLRTHTGGGGSQKPFQCRICMRNFSRREHLVRHLRTHTGEKPFQCRICMRNFSDGGNLGRHLKTHLRGS

SEQ ID NO: 2053 - protein, 179 aa, Synthetic construct
SRPGERPFQCRICMRNFSRREVLENHLRTHTGEKPFQCRICMRNFSIKHHLGRHLKTHTGGGGSQKPFQCRICMRNFSQAVNLARHLRTHTGEKPFQCRICMRNFSRSDHLSLHLKTHTGSQKPFQCRICMRNFSAPSKLKRHTRTHTGEKPFQCRICMRNFSTNSSLTRHLRTHLRGS

SEQ ID NO: 2054 - protein, 179 aa, Synthetic construct
SRPGERPFQCRICMRNFSTNSMLARHTRTHTGEKPFQCRICMRNFSQNEHLKVHLRTHTGGGGSQKPFQCRICMRNFSQRSNLARHTRTHTGEKPFQCRICMRNFSRKESLDVHLRTHTGSQKPFQCRICMRNFSQQTNLTRHLRTHTGEKPFQCRICMRNFSRPESLAPHLKTHLRGS

SEQ ID NO: 2055 - protein, 179 aa, Synthetic construct
SRPGERPFQCRICMRNFSDSPTLRRHTRTHTGEKPFQCRICMRNFSQSTTLKRHLRTHTGGGGSQKPFQCRICMRNFSRREHLVRHLRTHTGEKPFQCRICMRNFSVNSSLGRHLKTHTGSQKPFQCRICMRNFSRNFILQRHTRTHTGEKPFQCRICMRNFSEAHHLSRHLRTHLRGS

SEQ ID NO: 2056 - protein, 179 aa, Synthetic construct
SRPGERPFQCRICMRNFSSRSTHLRHTRTHTGEKPFQCRICMRNFSSHKSSLTHLRTHTGGGGSQKPFQCRICMRNFSRQDNLHTHLRTHTGEKPFQCRICMRNFSQNSHLRRHLKTHTGSQKPFQCRICMRNFSRNITLVRHTRTHTGEKPFQCRICMRNFSVKETLVRHLRTHLRGS

SEQ ID NO: 2057 - protein, 179 aa, Synthetic construct
SRPGERPFQCRICMRNFSYKESLVRHLRTHTGEKPFQCRICMRNFSQGGHLARHLKTHTGSQKPFQCRICMRNFSQSGTLKRHLRTHTGEKPFQCRICMRNFSKQWYLQLHLKTHTGGGGSQKPFQCRICMRNFSQSAHLKRHLRTHTGEKPFQCRICMRNFSQNSHLRRHLKTHLRGS

SEQ ID NO: 2058 - protein, 179 aa, Synthetic construct
SRPGERPFQCRICMRNFSDPANLRRHTRTHTGEKPFQCRICMRNFSRQEHLVRHLRTHTGSQKPFQCRICMRNFSLRDSLKRHLRTHTGEKPFQCRICMRNFSQRNALHGHLKTHTGGGGSQKPFQCRICMRNFSFFSYLKKHLRTHTGEKPFQCRICMRNFSRRDNLLRHLKTHLRGS

SEQ ID NO: 2059 - protein, 179 aa, Synthetic construct
SRPGERPFQCRICMRNFSKKDHLHRHTRTHTGEKPFQCRICMRNFSRREHLTIHLRTHTGSQKPFQCRICMRNFSRKQHLVLHTRTHTGEKPFQCRICMRNFSDHSSLKRHLRTHTGGGGSQKPFQCRICMRNFSQRGNLTRHLRTHTGEKPFQCRICMRNFSQSNSLKYHLKTHLRGS

SEQ ID NO: 2060 - protein, 179 aa, Synthetic construct
SRPGERPFQCRICMRNFSQQTNLTRHLRTHTGEKPFQCRICMRNFSIRHHLKRHLKTHTGSQKPFQCRICMRNFSLRSILKAHTRTHTGEKPFQCRICMRNFSQAGNLSRHLRTHTGGGGSQKPFQCRICMRNFSDRSNLTRHLRTHTGEKPFQCRICMRNFSRPDALPRHLKTHLRGS

SEQ ID NO: 2061 - protein, 179 aa, Synthetic construct
SRPGERPFQCRICMRNFSRREVLENHLRTHTGEKPFQCRICMRNFSDTGHLKRHLKTHTGSQKPFQCRICMRNFSKKFNLLQHTRTHTGEKPFQCRICMRNFSRRDNLKSHLRTHTGGGGSQKPFQCRICMRNFSDRGNLTRHLRTHTGEKPFQCRICMRNFSRKTGLLIHLKTHLRGS

SEQ ID NO: 2062 - protein, 179 aa, Synthetic construct
SRPGERPFQCRICMRNFSKKFNLLQHTRTHTGEKPFQCRICMRNFSRQDNLNSHLRTHTGGGGSQKPFQCRICMRNFSDPSNLQRHLRTHTGEKPFQCRICMRNFSRRDNLPKHLKTHTGSQKPFQCRICMRNFSRRAHLLNHTRTHTGEKPFQCRICMRNFSDRGNLTRHLRTHLRGS

SEQ ID NO: 2063 - protein, 179 aa, Synthetic construct
SRPGERPFQCRICMRNFSDRSVLKRHLRTHTGEKPFQCRICMRNFSDKRSLPVHLKTHTGSQKPFQCRICMRNFSQRGTLNRHTRTHTGEKPFQCRICMRNFSQSTTLKRHLRTHTGGGGSQKPFQCRICMRNFSRDDNLQRHLRTHTGEKPFQCRICMRNFSRMEHLPRHLKTHLRGS

SEQ ID NO: 2064 - protein, 179 aa, Synthetic construct
SRPGERPFQCRICMRNFSYKESLVRHLRTHTGEKPFQCRICMRNFSQGGHLARHLKTHTGSQKPFQCRICMRNFSQSGTLKRHLRTHTGEKPFQCRICMRNFSKQWYLQLHLKTHTGGGGSQKPFQCRICMRNFSQSAHLKRHLRTHTGEKPFQCRICMRNFSQTTHLSRHLKTHLRGS

SEQ ID NO: 2065 - protein, 179 aa, Synthetic construct
SRPGERPFQCRICMRNFSEEANLRRHTRTHTGEKPFQCRICMRNFSRREHLVRHLRTHTGSQKPFQCRICMRNFSLRDSLKRHLRTHTGEKPFQCRICMRNFSQRNALHGHLKTHTGGGGSQKPFQCRICMRNFSFFSYLKKHLRTHTGEKPFQCRICMRNFSRRDNLLRHLKTHLRGS

SEQ ID NO: 2066 - protein, 179 aa, Synthetic construct
SRPGERPFQCRICMRNFSRGHHLDRHTRTHTGEKPFQCRICMRNFSRNEHLVLHLRTHTGSQKPFQCRICMRNFSRKQHLVLHTRTHTGEKPFQCRICMRNFSDHSSLKRHLRTHTGGGGSQKPFQCRICMRNFSQRGNLTRHLRTHTGEKPFQCRICMRNFSQSNSLKYHLKTHLRGS

SEQ ID NO: 2067 - protein, 179 aa, Synthetic construct
SRPGERPFQCRICMRNFSQQTNLTRHLRTHTGEKPFQCRICMRNFSHGHRLKTHLKTHTGSQKPFQCRICMRNFSLRSILKAHTRTHTGEKPFQCRICMRNFSQAGNLSRHLRTHTGGGGSQKPFQCRICMRNFSDRSNLTRHLRTHTGEKPFQCRICMRNFSRPDALPRHLKTHLRGS

SEQ ID NO: 2068 - protein, 179 aa, Synthetic construct
SRPGERPFQCRICMRNFSTTYHLIRHTRTHTGEKPFQCRICMRNFSENSKLKRHLRTHTGSQKPFQCRICMRNFSKKFNLLQHTRTHTGEKPFQCRICMRNFSRRDNLKSHLRTHTGGGGSQKPFQCRICMRNFSDGSNLRRHLRTHTGEKPFQCRICMRNFSRIDNLDGHLKTHLRGS

SEQ ID NO: 2069 - protein, 179 aa, Synthetic construct
SRPGERPFQCRICMRNFSKRYNLYQHTRTHTGEKPFQCRICMRNFSRQDNLNTHLRTHTGGGGSQKPFQCRICMRNFSDGSNLRRHLRTHTGEKPFQCRICMRNFSRIDNLDGHLKTHTGSQKPFQCRICMRNFSRKDHLKTHLRTHTGEKPFQCRICMRNFSEGGNLMRHLKTHLRGS

SEQ ID NO: 2070 - protein, 179 aa, Synthetic construct
SRPGERPFQCRICMRNFSDRSVLKRHLRTHTGEKPFQCRICMRNFSDKRSLPVHLKTHTGSQKPFQCRICMRNFSQRGTLNRHTRTHTGEKPFQCRICMRNFSQSTTLKRHLRTHTGGGGSQKPFQCRICMRNFSREDNLDRHLRTHTGEKPFQCRICMRNFSRRHGLGRHLKTHLRGS

SEQ ID NO: 2071 - protein, 179 aa, Synthetic construct
SRPGERPFQCRICMRNFSYKESLVRHLRTHTGEKPFQCRICMRNFSQGGHLARHLKTHTGSQKPFQCRICMRNFSQSGTLKRHLRTHTGEKPFQCRICMRNFSKQWYLQLHLKTHTGGGGSQKPFQCRICMRNFSQSAHLKRHLRTHTGEKPFQCRICMRNFSQMSHLKRHLKTHLRGS

SEQ ID NO: 2072 - protein, 179 aa, Synthetic construct
SRPGERPFQCRICMRNFSEEANLRRHTRTHTGEKPFQCRICMRNFSRGEHLTRHLRTHTGSQKPFQCRICMRNFSVKHSLQRHLRTHTGEKPFQCRICMRNFSQRNTLKGHLKTHTGGGGSQKPFQCRICMRNFSSFQSYLEHLRTHTGEKPFQCRICMRNFSSRRDNLLHLKTHLRGS

SEQ ID NO: 2073 - protein, 179 aa, Synthetic construct
SRPGERPFQCRICMRNFSRKHHLGRHTRTHTGEKPFQCRICMRNFSRREHLTIHLRTHTGSQKPFQCRICMRNFSRKQHLALHTRTHTGEKPFQCRICMRNFSDHSSLKRHLRTHTGGGGSQKPFQCRICMRNFSQQTNLTRHLRTHTGEKPFQCRICMRNFSQGGILYRHLKTHLRGS

SEQ ID NO: 2074 - protein, 179 aa, Synthetic construct
SRPGERPFQCRICMRNFSQQTNLTRHLRTHTGEKPFQCRICMRNFSIRHHLKRHLKTHTGSQKPFQCRICMRNFSLRSILKAHTRTHTGEKPFQCRICMRNFSQAGNLSRHLRTHTGGGGSQKPFQCRICMRNFSDASNLARHLRTHTGEKPFQCRICMRNFSRHTSLTRHLKTHLRGS

SEQ ID NO: 2075 - protein, 179 aa, Synthetic construct
SRPGERPFQCRICMRNFSRREVLENHLRTHTGEKPFQCRICMRNFSDTGHLKRHLKTHTGSQKPFQCRICMRNFSKKFNLLQHTRTHTGEKPFQCRICMRNFSRRDNLKSHLRTHTGGGGSQKPFQCRICMRNFSDGSNLRRHLRTHTGEKPFQCRICMRNFSRIDNLDGHLKTHLRGS

SEQ ID NO: 2076 - protein, 179 aa, Synthetic construct
SRPGERPFQCRICMRNFSSKPNLKMHTRTHTGEKPFQCRICMRNFSRGDNLGRHLRTHTGSQKPFQCRICMRNFSRREVLENHLRTHTGEKPFQCRICMRNFSQSAHLGRHLKTHTGGGGSQKPFQCRICMRNFSQRSSLVRHLRTHTGEKPFQCRICMRNFSRTDHLGLHLKTHLRGS

SEQ ID NO: 2077 - protein, 179 aa, Synthetic construct
SRPGERPFQCRICMRNFSDRSVLKRHLRTHTGEKPFQCRICMRNFSDKRSLAPHLKTHTGSQKPFQCRICMRNFSQAETLKRHLRTHTGEKPFQCRICMRNFSQGGTLRRHLKTHTGGGGSQKPFQCRICMRNFSRDDNLQRHLRTHTGEKPFQCRICMRNFSRMEHLPRHLKTHLRGS

SEQ ID NO: 2078 - protein, 179 aa, Synthetic construct
SRPGERPFQCRICMRNFSLKQHLVVHLRTHTGEKPFQCRICMRNFSQAGHLTRHLKTHTGSQKPFQCRICMRNFSDNAHLARHTRTHTGEKPFQCRICMRNFSQKCNLKAHLRTHTGGGGSQKPFQCRICMRNFSQRSSLVRHLRTHTGEKPFQCRICMRNFSRTVALNRHLKTHLRGS

SEQ ID NO: 2079 - protein, 179 aa, Synthetic construct
SRPGERPFQCRICMRNFSEEANLRRHTRTHTGEKPFQCRICMRNFSRREHLVRHLRTHTGSQKPFQCRICMRNFSQRSDLTRHLRTHTGEKPFQCRICMRNFSQRNTLKGHLKTHTGGGGSQKPFQCRICMRNFSFFSYLKKHLRTHTGEKPFQCRICMRNFSRRDNLLRHLKTHLRGS

SEQ ID NO: 2080 - protein, 179 aa, Synthetic construct
SRPGERPFQCRICMRNFSQRGNLTRHLRTHTGEKPFQCRICMRNFSQSNSLKYHLKTHTGGGGSQKPFQCRICMRNFSQQTNLTRHLRTHTGEKPFQCRICMRNFSHGHRLKTHLKTHTGSQKPFQCRICMRNFSTRTELNVHTRTHTGEKPFQCRICMRNFSQAGNLRRHLRTHLRGS

SEQ ID NO: 2081 - protein, 179 aa, Synthetic construct
SRPGERPFQCRICMRNFSQQTNLTRHLRTHTGEKPFQCRICMRNFSRPESLAPHLKTHTGSQKPFQCRICMRNFSRTSSLKRHTRTHTGEKPFQCRICMRNFSHRESLTVHLRTHTGGGGSQKPFQCRICMRNFSRPDTLVVHLRTHTGEKPFQCRICMRNFSQGGTLRRHLKTHLRGS

SEQ ID NO: 2082 - protein, 179 aa, Synthetic construct
SRPGERPFQCRICMRNFSRREVLENHLRTHTGEKPFQCRICMRNFSDTGHLKRHLKTHTGSQKPFQCRICMRNFSKKFNLLQHTRTHTGEKPFQCRICMRNFSRKDYLISHLRTHTGGGGSQKPFQCRICMRNFSDRGNLTRHLRTHTGEKPFQCRICMRNFSRKTGLLIHLKTHLRGS

SEQ ID NO: 2083 - protein, 179 aa, Synthetic construct
SRPGERPFQCRICMRNFSSKPNLKMHTRTHTGEKPFQCRICMRNFSRGDNLGRHLRTHTGSQKPFQCRICMRNFSRNFILQRHTRTHTGEKPFQCRICMRNFSQSAHLKRHLRTHTGGGGSQKPFQCRICMRNFSQRSSLVRHLRTHTGEKPFQCRICMRNFSRSDHLSLHLKTHLRGS

SEQ ID NO: 2084 - protein, 179 aa, Synthetic construct
SRPGERPFQCRICMRNFSRADNLGRHLRTHTGEKPFQCRICMRNFSARNTLKGHLKTHTGGGGSQKPFQCRICMRNFSRRRNLTLHTRTHTGEKPFQCRICMRNFSRPHVLANHLRTHTGSQKPFQCRICMRNFSVKETLVRHLRTHTGEKPFQCRICMRNFSRQDNLQRHLKTHLRGS

SEQ ID NO: 2085 - protein, 179 aa, Synthetic construct
SRPGERPFQCRICMRNFSQKHHLAVHLRTHTGEKPFQCRICMRNFSQGGHLKRHLKTHTGSQKPFQCRICMRNFSDNAHLARHTRTHTGEKPFQCRICMRNFSQNCNLKSHLRTHTGGGGSQKPFQCRICMRNFSQRSSLVRHLRTHTGEKPFQCRICMRNFSRKDALHVHLKTHLRGS

SEQ ID NO: 2086 - protein, 179 aa, Synthetic construct
SRPGERPFQCRICMRNFSEEANLRRHTRTHTGEKPFQCRICMRNFSRGEHLTRHLRTHTGSQKPFQCRICMRNFSQRSDLTRHLRTHTGEKPFQCRICMRNFSQRNTLKGHLKTHTGGGGSQKPFQCRICMRNFSFHSYLQKHLRTHTGEKPFQCRICMRNFSRRDNLLRHLKTHLRGS

SEQ ID NO: 2087 - protein, 179 aa, Synthetic construct
SRPGERPFQCRICMRNFSQQTNLTRHLRTHTGEKPFQCRICMRNFSQGGILYRHLKTHTGGGGSQKPFQCRICMRNFSQQTNLTRHLRTHTGEKPFQCRICMRNFSHGHRLKTHLKTHTGSQKPFQCRICMRNFSTRTELNVHTRTHTGEKPFQCRICMRNFSQAGNLRRHLRTHLRGS

SEQ ID NO: 2088 - protein, 179 aa, Synthetic construct
SRPGERPFQCRICMRNFSQQTNLTRHLRTHTGEKPFQCRICMRNFSRPESLAPHLKTHTGSQKPFQCRICMRNFSRTSSLKRHTRTHTGEKPFQCRICMRNFSHRESLTVHLRTHTGGGGSQKPFQCRICMRNFSRSQTLKQHTRTHTGEKPFQCRICMRNFSQSTTLKRHLRTHLRGS

SEQ ID NO: 2089 - protein, 179 aa, Synthetic construct
SRPGERPFQCRICMRNFSKKFNLLQHTRTHTGEKPFQCRICMRNFSRQDNLNSHLRTHTGGGGSQKPFQCRICMRNFSDRGNLTRHLRTHTGEKPFQCRICMRNFSRKTGLLIHLKTHTGSQKPFQCRICMRNFSRRAHLLNHTRTHTGEKPFQCRICMRNFSDRGNLTRHLRTHLRGS

SEQ ID NO: 2090 - protein, 179 aa, Synthetic construct
SRPGERPFQCRICMRNFSSKPNLKMHTRTHTGEKPFQCRICMRNFSRGDNLGRHLRTHTGSQKPFQCRICMRNFSRREVLENHLRTHTGEKPFQCRICMRNFSQKPHLSRHLKTHTGGGGSQKPFQCRICMRNFSQRSSLVRHLRTHTGEKPFQCRICMRNFSRTDHLGLHLKTHLRGS

SEQ ID NO: 2091 - protein, 179 aa, Synthetic construct
SRPGERPFQCRICMRNFSRQDNLGRHLRTHTGEKPFQCRICMRNFSQRNALAGHLKTHTGGGGSQKPFQCRICMRNFSRRRNLTLHTRTHTGEKPFQCRICMRNFSRVEVLTNHLRTHTGSQKPFQCRICMRNFSVKETLVRHLRTHTGEKPFQCRICMRNFSRQDNLQRHLKTHLRGS

SEQ ID NO: 2092 - protein, 179 aa, Synthetic construct
SRPGERPFQCRICMRNFSRNTHLARHTRTHTGEKPFQCRICMRNFSRADVLKGHLRTHTGSQKPFQCRICMRNFSTTTKLAIHTRTHTGEKPFQCRICMRNFSVNHNLTRHLRTHTGGGGSQKPFQCRICMRNFSTGAVLTRHTRTHTGEKPFQCRICMRNFSQRSSLVRHLRTHLRGS

SEQ ID NO: 2093 - protein, 179 aa, Synthetic construct
SRPGERPFQCRICMRNFSKKDHLHRHTRTHTGEKPFQCRICMRNFSRREHLTIHLRTHTGSQKPFQCRICMRNFSRKQHLALHTRTHTGEKPFQCRICMRNFSDHSSLKRHLRTHTGGGGSQKPFQCRICMRNFSQRGNLTRHLRTHTGEKPFQCRICMRNFSQSNSLKYHLKTHLRGS

SEQ ID NO: 2094 - protein, 179 aa, Synthetic construct
SRPGERPFQCRICMRNFSQQTNLTRHLRTHTGEKPFQCRICMRNFSLTQHLVRHLKTHTGSQKPFQCRICMRNFSTRTELNVHTRTHTGEKPFQCRICMRNFSQAGNLRRHLRTHTGGGGSQKPFQCRICMRNFSLGENLRRHLRTHTGEKPFQCRICMRNFSRGDALARHLKTHLRGS

SEQ ID NO: 2095 - protein, 179 aa, Synthetic construct
SRPGERPFQCRICMRNFSQQTNLTRHLRTHTGEKPFQCRICMRNFSRRDHLSLHLKTHTGSQKPFQCRICMRNFSRTSSLKRHTRTHTGEKPFQCRICMRNFSHRESLTVHLRTHTGGGGSQKPFQCRICMRNFSRPDTLVVHLRTHTGEKPFQCRICMRNFSQGGTLRRHLKTHLRGS

SEQ ID NO: 2096 - protein, 179 aa, Synthetic construct
SRPGERPFQCRICMRNFSKRYNLYQHTRTHTGEKPFQCRICMRNFSRQDNLNTHLRTHTGGGGSQKPFQCRICMRNFSDGSNLRRHLRTHTGEKPFQCRICMRNFSRIDNLDGHLKTHTGSQKPFQCRICMRNFSRRAHLLNHTRTHTGEKPFQCRICMRNFSDRGNLTRHLRTHLRGS

SEQ ID NO: 2097 - protein, 179 aa, Synthetic construct
SRPGERPFQCRICMRNFSDRSVLKRHLRTHTGEKPFQCRICMRNFSDKRSLPVHLKTHTGSQKPFQCRICMRNFSQGGTLKRHLRTHTGEKPFQCRICMRNFSQGGTLRRHLKTHTGGGGSQKPFQCRICMRNFSRDDNLQRHLRTHTGEKPFQCRICMRNFSRMEHLPRHLKTHLRGS

SEQ ID NO: 2098 - protein, 179 aa, Synthetic construct
SRPGERPFQCRICMRNFSRQDNLGRHLRTHTGEKPFQCRICMRNFSQRNALAGHLKTHTGGGGSQKPFQCRICMRNFSRRRNLTLHTRTHTGEKPFQCRICMRNFSRKQVLTNHLRTHTGSQKPFQCRICMRNFSVKETLVRHLRTHTGEKPFQCRICMRNFSRQDNLQRHLKTHLRGS

SEQ ID NO: 2099 - protein, 179 aa, Synthetic construct
SRPGERPFQCRICMRNFSRNTHLARHTRTHTGEKPFQCRICMRNFSRAESLRVHLRTHTGSQKPFQCRICMRNFSTTTKLAIHTRTHTGEKPFQCRICMRNFSVNHNLTRHLRTHTGGGGSQKPFQCRICMRNFSDHSSLKRHLRTHTGEKPFQCRICMRNFSQSTSLQRHLKTHLRGS

SEQ ID NO: 2100 - protein, 179 aa, Synthetic construct
SRPGERPFQCRICMRNFSRKHHLGRHTRTHTGEKPFQCRICMRNFSRREHLTIHLRTHTGSQKPFQCRICMRNFSRKQHLVLHTRTHTGEKPFQCRICMRNFSDHSSLKRHLRTHTGGGGSQKPFQCRICMRNFSQRGNLTRHLRTHTGEKPFQCRICMRNFSQSNSLKYHLKTHLRGS

SEQ ID NO: 2101 - protein, 179 aa, Synthetic construct
SRPGERPFQCRICMRNFSQQTNLTRHLRTHTGEKPFQCRICMRNFSHGHRLKTHLKTHTGSQKPFQCRICMRNFSLRSILKAHTRTHTGEKPFQCRICMRNFSQAGNLSRHLRTHTGGGGSQKPFQCRICMRNFSDASNLARHLRTHTGEKPFQCRICMRNFSRHTSLTRHLKTHLRGS

SEQ ID NO: 2102 - protein, 179 aa, Synthetic construct
SRPGERPFQCRICMRNFSRREVLENHLRTHTGEKPFQCRICMRNFSDTGHLKRHLKTHTGSQKPFQCRICMRNFSKKFNLLQHTRTHTGEKPFQCRICMRNFSRQDNLNSHLRTHTGGGGSQKPFQCRICMRNFSDGSNLRRHLRTHTGEKPFQCRICMRNFSRIDNLDGHLKTHLRGS

SEQ ID NO: 2103 - protein, 179 aa, Synthetic construct
SRPGERPFQCRICMRNFSKKFNLLQHTRTHTGEKPFQCRICMRNFSRQDNLNSHLRTHTGGGGSQKPFQCRICMRNFSDPSNLQRHLRTHTGEKPFQCRICMRNFSRRDNLPKHLKTHTGSQKPFQCRICMRNFSRKDHLKTHLRTHTGEKPFQCRICMRNFSEGGNLMRHLKTHLRGS

SEQ ID NO: 2104 - protein, 179 aa, Synthetic construct
SRPGERPFQCRICMRNFSDRSVLKRHLRTHTGEKPFQCRICMRNFSDKRSLAPHLKTHTGSQKPFQCRICMRNFSQGGTLKRHLRTHTGEKPFQCRICMRNFSQGGTLRRHLKTHTGGGGSQKPFQCRICMRNFSRADNLGRHLRTHTGEKPFQCRICMRNFSRMEHLPRHLKTHLRGS

SEQ ID NO: 2105 - protein, 179 aa, Synthetic construct
SRPGERPFQCRICMRNFSRQDNLGRHLRTHTGEKPFQCRICMRNFSQRNALAGHLKTHTGGGGSQKPFQCRICMRNFSRRRNLTLHTRTHTGEKPFQCRICMRNFSRPHVLANHLRTHTGSQKPFQCRICMRNFSVRETLVRHLRTHTGEKPFQCRICMRNFSRGDNLKRHLKTHLRGS

SEQ ID NO: 2106 - protein, 179 aa, Synthetic construct
SRPGERPFQCRICMRNFSEEANLRRHTRTHTGEKPFQCRICMRNFSRREHLVRHLRTHTGSQKPFQCRICMRNFSQRSDLTRHLRTHTGEKPFQCRICMRNFSQRNTLKGHLKTHTGGGGSQKPFQCRICMRNFSSFQSYLEHLRTHTGEKPFQCRICMRNFSSRRDNLLHLKTHLRGS

SEQ ID NO: 2107 - protein, 179 aa, Synthetic construct
SRPGERPFQCRICMRNFSRGHHLDRHTRTHTGEKPFQCRICMRNFSRNEHLVLHLRTHTGSQKPFQCRICMRNFSRKQHLVLHTRTHTGEKPFQCRICMRNFSDHSSLKRHLRTHTGGGGSQKPFQCRICMRNFSQQTNLTRHLRTHTGEKPFQCRICMRNFSQGGILYRHLKTHLRGS

SEQ ID NO: 2108 - protein, 179 aa, Synthetic construct
SRPGERPFQCRICMRNFSQQTNLTRHLRTHTGEKPFQCRICMRNFSIRHHLKRHLKTHTGSQKPFQCRICMRNFSLRSILKAHTRTHTGEKPFQCRICMRNFSQAGNLSRHLRTHTGGGGSQKPFQCRICMRNFSLGENLRRHLRTHTGEKPFQCRICMRNFSRGDALARHLKTHLRGS

SEQ ID NO: 2109 - protein, 179 aa, Synthetic construct
SRPGERPFQCRICMRNFSTTYHLIRHTRTHTGEKPFQCRICMRNFSENSKLKRHLRTHTGSQKPFQCRICMRNFSKKFNLLQHTRTHTGEKPFQCRICMRNFSRQDNLNSHLRTHTGGGGSQKPFQCRICMRNFSDGSNLRRHLRTHTGEKPFQCRICMRNFSRIDNLDGHLKTHLRGS

SEQ ID NO: 2110 - protein, 179 aa, Synthetic construct
SRPGERPFQCRICMRNFSKKFNLLQHTRTHTGEKPFQCRICMRNFSRKDYLISHLRTHTGGGGSQKPFQCRICMRNFSDRGNLTRHLRTHTGEKPFQCRICMRNFSRKTGLLIHLKTHTGSQKPFQCRICMRNFSRRAHLLNHTRTHTGEKPFQCRICMRNFSDRGNLTRHLRTHLRGS

SEQ ID NO: 2111 - protein, 179 aa, Synthetic construct
SRPGERPFQCRICMRNFSDRSVLKRHLRTHTGEKPFQCRICMRNFSDKRSLAPHLKTHTGSQKPFQCRICMRNFSQAETLKRHLRTHTGEKPFQCRICMRNFSQGGTLRRHLKTHTGGGGSQKPFQCRICMRNFSREDNLDRHLRTHTGEKPFQCRICMRNFSRRHGLGRHLKTHLRGS

SEQ ID NO: 2112 - protein, 179 aa, Synthetic construct
SRPGERPFQCRICMRNFSRQDNLGRHLRTHTGEKPFQCRICMRNFSQRNTLKGHLKTHTGGGGSQKPFQCRICMRNFSRRRNLTLHTRTHTGEKPFQCRICMRNFSRVEVLTNHLRTHTGSQKPFQCRICMRNFSVRETLVRHLRTHTGEKPFQCRICMRNFSRGDNLKRHLKTHLRGS

SEQ ID NO: 2113 - protein, 176 aa, Synthetic construct
SRPGERPFQCRICMRNFSDRTTLKRHLRTHTGEKPFQCRICMRNFSRVDHLKTHLKTHTGSQKPFQCRICMRNFSRSTHLHNHTRTHTGEKPFQCRICMRNFSDRGNLTRHLRTHTGSQKPFQCRICMRNFSLAWNLNTHLRTHTGEKPFQCRICMRNFSQSVNLRRHLKTHLRGS

SEQ ID NO: 2114 - protein, 176 aa, Synthetic construct
SRPGERPFQCRICMRNFSQSTTLKRHLRTHTGEKPFQCRICMRNFSRRDGLAGHLKTHTGSQKPFQCRICMRNFSRGDNLGRHLRTHTGEKPFQCRICMRNFSRSDHLSLHLKTHTGSQKPFQCRICMRNFSRKESLTIHLRTHTGEKPFQCRICMRNFSRMDVLSLHLKTHLRGS

SEQ ID NO: 2115 - protein, 176 aa, Synthetic construct
SRPGERPFQCRICMRNFSQLSNLTRHTRTHTGEKPFQCRICMRNFSRREHLVRHLRTHTGSQKPFQCRICMRNFSKNNDLTRHTRTHTGEKPFQCRICMRNFSRREHLVRHLRTHTGSQKPFQCRICMRNFSKGYNLTVHTRTHTGEKPFQCRICMRNFSHQHRLKTHLRTHLRGS

SEQ ID NO: 2116 - protein, 176 aa, Synthetic construct
SRPGERPFQCRICMRNFSDSSVLRRHLRTHTGEKPFQCRICMRNFSQPHGLRGHLKTHTGSQKPFQCRICMRNFSRREHLVRHLRTHTGEKPFQCRICMRNFSQDGNLGRHLKTHTGSQKPFQCRICMRNFSRREHLTIHLRTHTGEKPFQCRICMRNFSEKSHLTRHLKTHLRGS

SEQ ID NO: 2117 - protein, 176 aa, Synthetic construct
SRPGERPFQCRICMRNFSDRSSLKRHLRTHTGEKPFQCRICMRNFSQHPNLTRHLKTHTGSQKPFQCRICMRNFSQSPHLKRHLRTHTGEKPFQCRICMRNFSRTEHLARHLKTHTGSQKPFQCRICMRNFSSRSTHLRHTRTHTGEKPFQCRICMRNFSSHKSSLTHLRTHLRGS

SEQ ID NO: 2118 - protein, 176 aa, Synthetic construct
SRPGERPFQCRICMRNFSKKFNLQAHTRTHTGEKPFQCRICMRNFSDPSNLARHLRTHTGSQKPFQCRICMRNFSRQDNLQSHLRTHTGEKPFQCRICMRNFSRRHRLTLHLKTHTGSQKPFQCRICMRNFSQRSNLARHTRTHTGEKPFQCRICMRNFSRKESLDVHLRTHLRGS

SEQ ID NO: 2119 - protein, 176 aa, Synthetic construct
SRPGERPFQCRICMRNFSDLSTLRRHTRTHTGEKPFQCRICMRNFSLSQTLKRHLRTHTGSQKPFQCRICMRNFSQRSSLVRHLRTHTGEKPFQCRICMRNFSQPHHLPRHLKTHTGSQKPFQCRICMRNFSGHTALRNHTRTHTGEKPFQCRICMRNFSDSGVLKRHLRTHLRGS

SEQ ID NO: 2120 - protein, 176 aa, Synthetic construct
SRPGERPFQCRICMRNFSTHAHLTRHTRTHTGEKPFQCRICMRNFSRRDNLHTHLRTHTGSQKPFQCRICMRNFSLRANLQRHTRTHTGEKPFQCRICMRNFSQREHLNVHLRTHTGSQKPFQCRICMRNFSDHSSLKRHLRTHTGEKPFQCRICMRNFSQSPHLQRHLKTHLRGS

SEQ ID NO: 2121 - protein, 179 aa, Synthetic construct
SRPGERPFQCRICMRNFSQSSSLVRHLRTHTGEKPFQCRICMRNFSQTTHLSRHLKTHTGSQKPFQCRICMRNFSRREVLENHLRTHTGEKPFQCRICMRNFSVKHGLTRHLKTHTGGGGSQKPFQCRICMRNFSHRESLTVHLRTHTGEKPFQCRICMRNFSQTATLKRHLKTHLRGS

SEQ ID NO: 2122 - protein, 179 aa, Synthetic construct
SRPGERPFQCRICMRNFSRREHLVRHLRTHTGEKPFQCRICMRNFSQNSHLRRHLKTHTGGGGSQKPFQCRICMRNFSRREHLMRHLRTHTGEKPFQCRICMRNFSARNTLKGHLKTHTGSQKPFQCRICMRNFSQGGTLNRHLRTHTGEKPFQCRICMRNFSRRDHLLRHLKTHLRGS

SEQ ID NO: 2123 - protein, 176 aa, Synthetic construct
SRPGERPFQCRICMRNFSDSSVLRRHLRTHTGEKPFQCRICMRNFSRSDHLSLHLKTHTGSQKPFQCRICMRNFSRRAHLLNHTRTHTGEKPFQCRICMRNFSDRGNLTRHLRTHTGSQKPFQCRICMRNFSLAWNLNTHLRTHTGEKPFQCRICMRNFSQSVNLRRHLKTHLRGS

SEQ ID NO: 2124 - protein, 176 aa, Synthetic construct
SRPGERPFQCRICMRNFSQRGNLTRHLRTHTGEKPFQCRICMRNFSQSNSLKYHLKTHTGSQKPFQCRICMRNFSQRGNLLRHLRTHTGEKPFQCRICMRNFSTKQWTLGHLKTHTGSQKPFQCRICMRNFSRRQHLQYHTRTHTGEKPFQCRICMRNFSRREHLVRHLRTHLRGS

SEQ ID NO: 2125 - protein, 176 aa, Synthetic construct
SRPGERPFQCRICMRNFSQLSNLTRHTRTHTGEKPFQCRICMRNFSRREHLVRHLRTHTGSQKPFQCRICMRNFSKGNDLTRHTRTHTGEKPFQCRICMRNFSRREHLVRHLRTHTGSQKPFQCRICMRNFSKRFNLMEHTRTHTGEKPFQCRICMRNFSHRHSLTRHLRTHLRGS

SEQ ID NO: 2126 - protein, 176 aa, Synthetic construct
SRPGERPFQCRICMRNFSDSSVLRRHLRTHTGEKPFQCRICMRNFSQPHGLRGHLKTHTGSQKPFQCRICMRNFSRREHLVRHLRTHTGEKPFQCRICMRNFSQDGNLGRHLKTHTGSQKPFQCRICMRNFSRKEHLSIHLRTHTGEKPFQCRICMRNFSDKSHLTRHLKTHLRGS

SEQ ID NO: 2127 - protein, 176 aa, Synthetic construct
SRPGERPFQCRICMRNFSDRSSLKRHLRTHTGEKPFQCRICMRNFSQHPNLTRHLKTHTGSQKPFQCRICMRNFSQSAHLKRHLRTHTGEKPFQCRICMRNFSRTEHLARHLKTHTGSQKPFQCRICMRNFSQSAHLKRHLRTHTGEKPFQCRICMRNFSHHNSLTRHLKTHLRGS

SEQ ID NO: 2128 - protein, 176 aa, Synthetic construct
SRPGERPFQCRICMRNFSKKCNLLSHTRTHTGEKPFQCRICMRNFSERGNLARHLRTHTGSQKPFQCRICMRNFSRKDNLNTHLRTHTGEKPFQCRICMRNFSRRHRLTLHLKTHTGSQKPFQCRICMRNFSQGGNLTRHLRTHTGEKPFQCRICMRNFSRKMTLMAHLKTHLRGS

SEQ ID NO: 2129 - protein, 176 aa, Synthetic construct
SRPGERPFQCRICMRNFSDGSTLRRHTRTHTGEKPFQCRICMRNFSLSQTLKRHLRTHTGSQKPFQCRICMRNFSQRSSLVRHLRTHTGEKPFQCRICMRNFSLKHGLTRHLKTHTGSQKPFQCRICMRNFSGRTALKTHTRTHTGEKPFQCRICMRNFSDSGVLKRHLRTHLRGS

SEQ ID NO: 2130 - protein, 176 aa, Synthetic construct
SRPGERPFQCRICMRNFSRREVLENHLRTHTGEKPFQCRICMRNFSRRDNLNRHLKTHTGSQKPFQCRICMRNFSGMLSLAVHTRTHTGEKPFQCRICMRNFSDASNLRRHLRTHTGSQKPFQCRICMRNFSQNEHLKVHLRTHTGEKPFQCRICMRNFSQGGTLRRHLKTHLRGS

SEQ ID NO: 2131 - protein, 179 aa, Synthetic construct
SRPGERPFQCRICMRNFSHRQTLTRHTRTHTGEKPFQCRICMRNFSRQDNLGRHLRTHTGSQKPFQCRICMRNFSQSGTLKRHLRTHTGEKPFQCRICMRNFSKQWYLQLHLKTHTGGGGSQKPFQCRICMRNFSDRSSLKRHLRTHTGEKPFQCRICMRNFSQHPNLTRHLKTHLRGS

SEQ ID NO: 2132 - protein, 176 aa, Synthetic construct
SRPGERPFQCRICMRNFSDRTTLKRHLRTHTGEKPFQCRICMRNFSRVDHLKTHLKTHTGSQKPFQCRICMRNFSRRTHLRVHTRTHTGEKPFQCRICMRNFSDRGNLTRHLRTHTGSQKPFQCRICMRNFSHQWNLQTHLRTHTGEKPFQCRICMRNFSQDGNLGRHLKTHLRGS

SEQ ID NO: 2133 - protein, 176 aa, Synthetic construct
SRPGERPFQCRICMRNFSQRGNLTRHLRTHTGEKPFQCRICMRNFSQSNSLKYHLKTHTGSQKPFQCRICMRNFSQRGNLARHLRTHTGEKPFQCRICMRNFSTKQWTLGHLKTHTGSQKPFQCRICMRNFSRRQHLQYHTRTHTGEKPFQCRICMRNFSRREHLVRHLRTHLRGS

SEQ ID NO: 2134 - protein, 176 aa, Synthetic construct
SRPGERPFQCRICMRNFSTTTNLRRHTRTHTGEKPFQCRICMRNFSRREHLVRHLRTHTGSQKPFQCRICMRNFSRRHDLRRHTRTHTGEKPFQCRICMRNFSRQAHLQNHLRTHTGSQKPFQCRICMRNFSKRFNLMEHTRTHTGEKPFQCRICMRNFSHRHSLTRHLRTHLRGS

SEQ ID NO: 2135 - protein, 176 aa, Synthetic construct
SRPGERPFQCRICMRNFSRSRNLTLHTRTHTGEKPFQCRICMRNFSRREHLVRHLRTHTGSQKPFQCRICMRNFSHKSSLTRHLRTHTGEKPFQCRICMRNFSRNTALQHHLKTHTGSQKPFQCRICMRNFSLGHHLVRHLRTHTGEKPFQCRICMRNFSDPSNLRRHLKTHLRGS

SEQ ID NO: 2136 - protein, 176 aa, Synthetic construct
SRPGERPFQCRICMRNFSYKESLVRHLRTHTGEKPFQCRICMRNFSQGGHLARHLKTHTGSQKPFQCRICMRNFSQSGTLKRHLRTHTGEKPFQCRICMRNFSKQWYLQLHLKTHTGSQKPFQCRICMRNFSEEANLRRHTRTHTGEKPFQCRICMRNFSRQDNLGRHLRTHLRGS

SEQ ID NO: 2137 - protein, 176 aa, Synthetic construct
SRPGERPFQCRICMRNFSSRFNLSTHTRTHTGEKPFQCRICMRNFSDASNLRRHLRTHTGSQKPFQCRICMRNFSRKDNLNTHLRTHTGEKPFQCRICMRNFSRTAHLQVHLKTHTGSQKPFQCRICMRNFSQRSNLARHTRTHTGEKPFQCRICMRNFSRKESLDVHLRTHLRGS

SEQ ID NO: 2138 - protein, 176 aa, Synthetic construct
SRPGERPFQCRICMRNFSDGSTLRRHTRTHTGEKPFQCRICMRNFSLSQTLKRHLRTHTGSQKPFQCRICMRNFSQRSSLVRHLRTHTGEKPFQCRICMRNFSQPHHLPRHLKTHTGSQKPFQCRICMRNFSGHTALRNHTRTHTGEKPFQCRICMRNFSDSGVLKRHLRTHLRGS

SEQ ID NO: 2139 - protein, 179 aa, Synthetic construct
SRPGERPFQCRICMRNFSQGTNLVRHLRTHTGEKPFQCRICMRNFSQHSSLSRHLKTHTGGGGSQKPFQCRICMRNFSDRGNLTRHLRTHTGEKPFQCRICMRNFSIRTSLKRHLKTHTGSQKPFQCRICMRNFSHKESLKVHLRTHTGEKPFQCRICMRNFSVMGNLTRHLKTHLRGS

SEQ ID NO: 2140 - protein, 179 aa, Synthetic construct
SRPGERPFQCRICMRNFSTKPILVRHTRTHTGEKPFQCRICMRNFSRQDNLGRHLRTHTGSQKPFQCRICMRNFSQSGTLKRHLRTHTGEKPFQCRICMRNFSKQWYLQLHLKTHTGGGGSQKPFQCRICMRNFSDPSSLKRHLRTHTGEKPFQCRICMRNFSQHPNLTRHLKTHLRGS

SEQ ID NO: 2141 - protein, 176 aa, Synthetic construct
SRPGERPFQCRICMRNFSDRTTLKRHLRTHTGEKPFQCRICMRNFSRSDHLSLHLKTHTGSQKPFQCRICMRNFSRRTHLRVHTRTHTGEKPFQCRICMRNFSDRGNLTRHLRTHTGSQKPFQCRICMRNFSLPWNLQTHLRTHTGEKPFQCRICMRNFSQDGNLGRHLKTHLRGS

SEQ ID NO: 2142 - protein, 176 aa, Synthetic construct
SRPGERPFQCRICMRNFSQQTNLTRHLRTHTGEKPFQCRICMRNFSQGGILYRHLKTHTGSQKPFQCRICMRNFSQAGNLSRHLRTHTGEKPFQCRICMRNFSTKQWTLGHLKTHTGSQKPFQCRICMRNFSRRQHLQYHTRTHTGEKPFQCRICMRNFSRREHLVRHLRTHLRGS

SEQ ID NO: 2143 - protein, 176 aa, Synthetic construct
SRPGERPFQCRICMRNFSTTTNLRRHTRTHTGEKPFQCRICMRNFSRREHLVRHLRTHTGSQKPFQCRICMRNFSRRHDLRRHTRTHTGEKPFQCRICMRNFSRQAHLQNHLRTHTGSQKPFQCRICMRNFSKRFNLNQHTRTHTGEKPFQCRICMRNFSHKHRLVTHLRTHLRGS

SEQ ID NO: 2144 - protein, 176 aa, Synthetic construct
SRPGERPFQCRICMRNFSRRRNLTLHTRTHTGEKPFQCRICMRNFSRREHLVRHLRTHTGSQKPFQCRICMRNFSTSTVLMRHTRTHTGEKPFQCRICMRNFSRREVLENHLRTHTGSQKPFQCRICMRNFSLRQHLVRHLRTHTGEKPFQCRICMRNFSDPSNLRRHLKTHLRGS

SEQ ID NO: 2145 - protein, 176 aa, Synthetic construct
SRPGERPFQCRICMRNFSYKESLVRHLRTHTGEKPFQCRICMRNFSQGGHLARHLKTHTGSQKPFQCRICMRNFSQSGTLKRHLRTHTGEKPFQCRICMRNFSKQWYLQLHLKTHTGSQKPFQCRICMRNFSEEVNLRRHTRTHTGEKPFQCRICMRNFSRADNLGRHLRTHLRGS

SEQ ID NO: 2146 - protein, 176 aa, Synthetic construct
SRPGERPFQCRICMRNFSSRFNLSTHTRTHTGEKPFQCRICMRNFSDASNLRRHLRTHTGSQKPFQCRICMRNFSRKDNLNTHLRTHTGEKPFQCRICMRNFSRRHRLTLHLKTHTGSQKPFQCRICMRNFSQRGNLARHLRTHTGEKPFQCRICMRNFSRNHSLRMHLKTHLRGS

SEQ ID NO: 2147 - protein, 176 aa, Synthetic construct
SRPGERPFQCRICMRNFSDPSTLRRHTRTHTGEKPFQCRICMRNFSLRDSLKRHLRTHTGSQKPFQCRICMRNFSQRSSLVRHLRTHTGEKPFQCRICMRNFSQPHHLPRHLKTHTGSQKPFQCRICMRNFSGASALRSHTRTHTGEKPFQCRICMRNFSESTTLKRHLRTHLRGS

SEQ ID NO: 2148 - protein, 179 aa, Synthetic construct
SRPGERPFQCRICMRNFSQGTNLVRHLRTHTGEKPFQCRICMRNFSQHSSLSRHLKTHTGGGGSQKPFQCRICMRNFSDRGNLTRHLRTHTGEKPFQCRICMRNFSHHNSLTRHLKTHTGSQKPFQCRICMRNFSHKESLKVHLRTHTGEKPFQCRICMRNFSVMGNLTRHLKTHLRGS

SEQ ID NO: 2149 - protein, 179 aa, Synthetic construct
SRPGERPFQCRICMRNFSTKPILVRHTRTHTGEKPFQCRICMRNFSRQDNLGRHLRTHTGSQKPFQCRICMRNFSQSGTLKRHLRTHTGEKPFQCRICMRNFSKQWYLQLHLKTHTGGGGSQKPFQCRICMRNFSDRSSLKRHLRTHTGEKPFQCRICMRNFSQHPNLTRHLKTHLRGS

SEQ ID NO: 2150 - protein, 176 aa, Synthetic construct
SRPGERPFQCRICMRNFSDRTTLKRHLRTHTGEKPFQCRICMRNFSRVDHLKTHLKTHTGSQKPFQCRICMRNFSRRTHLRVHTRTHTGEKPFQCRICMRNFSDRGNLTRHLRTHTGSQKPFQCRICMRNFSLPWNLQTHLRTHTGEKPFQCRICMRNFSQDGNLGRHLKTHLRGS

SEQ ID NO: 2151 - protein, 176 aa, Synthetic construct
SRPGERPFQCRICMRNFSQQTNLTRHLRTHTGEKPFQCRICMRNFSQGGILYRHLKTHTGSQKPFQCRICMRNFSQRGNLLRHLRTHTGEKPFQCRICMRNFSTKQWTLGHLKTHTGSQKPFQCRICMRNFSRRQHLQYHTRTHTGEKPFQCRICMRNFSRREHLVRHLRTHLRGS

SEQ ID NO: 2152 - protein, 176 aa, Synthetic construct
SRPGERPFQCRICMRNFSQLSNLTRHTRTHTGEKPFQCRICMRNFSRREHLVRHLRTHTGSQKPFQCRICMRNFSRRHDLRRHTRTHTGEKPFQCRICMRNFSRQAHLQNHLRTHTGSQKPFQCRICMRNFSKGYNLTVHTRTHTGEKPFQCRICMRNFSHQHRLKTHLRTHLRGS

SEQ ID NO: 2153 - protein, 176 aa, Synthetic construct
SRPGERPFQCRICMRNFSRSRNLTLHTRTHTGEKPFQCRICMRNFSRREHLVRHLRTHTGSQKPFQCRICMRNFSHKSSLTRHLRTHTGEKPFQCRICMRNFSRNTALQHHLKTHTGSQKPFQCRICMRNFSLRQHLVRHLRTHTGEKPFQCRICMRNFSDPSNLRRHLKTHLRGS

SEQ ID NO: 2154 - protein, 176 aa, Synthetic construct
SRPGERPFQCRICMRNFSYKESLVRHLRTHTGEKPFQCRICMRNFSQGGHLARHLKTHTGSQKPFQCRICMRNFSQSGTLKRHLRTHTGEKPFQCRICMRNFSKQWYLQLHLKTHTGSQKPFQCRICMRNFSDRANLRRHLRTHTGEKPFQCRICMRNFSRADNLGRHLKTHLRGS

SEQ ID NO: 2155 - protein, 176 aa, Synthetic construct
SRPGERPFQCRICMRNFSVRSRLRLHTRTHTGEKPFQCRICMRNFSEKGHLNRHLRTHTGSQKPFQCRICMRNFSSKPNLKMHTRTHTGEKPFQCRICMRNFSRGDNLGRHLRTHTGSQKPFQCRICMRNFSRREVLENHLRTHTGEKPFQCRICMRNFSQKPHLSRHLKTHLRGS

SEQ ID NO: 2156 - protein, 176 aa, Synthetic construct
SRPGERPFQCRICMRNFSTHAHLTRHTRTHTGEKPFQCRICMRNFSRQDNLHTHLRTHTGSQKPFQCRICMRNFSLRANLQRHTRTHTGEKPFQCRICMRNFSQREHLNVHLRTHTGSQKPFQCRICMRNFSTSTLLNRHTRTHTGEKPFQCRICMRNFSQSPHLKRHLRTHLRGS

SEQ ID NO: 2157 - protein, 179 aa, Synthetic construct
SRPGERPFQCRICMRNFSQAQNLSRHLRTHTGEKPFQCRICMRNFSQKIVLLRHLKTHTGGGGSQKPFQCRICMRNFSDRGNLTRHLRTHTGEKPFQCRICMRNFSIRTSLKRHLKTHTGSQKPFQCRICMRNFSHKESLKVHLRTHTGEKPFQCRICMRNFSVMGNLTRHLKTHLRGS

SEQ ID NO: 2158 - protein, 179 aa, Synthetic construct
SRPGERPFQCRICMRNFSRREHLMRHLRTHTGEKPFQCRICMRNFSQTTHLSRHLKTHTGGGGSQKPFQCRICMRNFSRREHLVRHLRTHTGEKPFQCRICMRNFSQRNTLLNHLKTHTGSQKPFQCRICMRNFSQGGTLNRHLRTHTGEKPFQCRICMRNFSRRDHLLRHLKTHLRGS

SEQ ID NO: 2159 - protein, 176 aa, Synthetic construct
SRPGERPFQCRICMRNFSDRTTLKRHLRTHTGEKPFQCRICMRNFSRSDHLSLHLKTHTGSQKPFQCRICMRNFSRSTHLHNHTRTHTGEKPFQCRICMRNFSDRGNLTRHLRTHTGSQKPFQCRICMRNFSHQWNLQTHLRTHTGEKPFQCRICMRNFSQDGNLGRHLKTHLRGS

SEQ ID NO: 2160 - protein, 176 aa, Synthetic construct
SRPGERPFQCRICMRNFSKKIDLVRHTRTHTGEKPFQCRICMRNFSLKGHLTRHLRTHTGSQKPFQCRICMRNFSRQDNLGRHLRTHTGEKPFQCRICMRNFSVSNTLTRHLKTHTGSQKPFQCRICMRNFSQTANLMRHLRTHTGEKPFQCRICMRNFSRTEHLARHLKTHLRGS

SEQ ID NO: 2161 - protein, 176 aa, Synthetic construct
SRPGERPFQCRICMRNFSDSSVLRRHLRTHTGEKPFQCRICMRNFSQPHGLAHHLKTHTGSQKPFQCRICMRNFSRREHLVRHLRTHTGEKPFQCRICMRNFSQDGNLGRHLKTHTGSQKPFQCRICMRNFSRKEHLSIHLRTHTGEKPFQCRICMRNFSDKSHLTRHLKTHLRGS

SEQ ID NO: 2162 - protein, 176 aa, Synthetic construct
SRPGERPFQCRICMRNFSRRDNLHTHLRTHTGEKPFQCRICMRNFSQGGHLKRHLKTHTGSQKPFQCRICMRNFSRNITLVRHTRTHTGEKPFQCRICMRNFSVKETLVRHLRTHTGSQKPFQCRICMRNFSHKSSLTRHLRTHTGEKPFQCRICMRNFSQQGNLQLHLKTHLRGS

SEQ ID NO: 2163 - protein, 176 aa, Synthetic construct
SRPGERPFQCRICMRNFSQSGTLKRHLRTHTGEKPFQCRICMRNFSKQWYLQLHLKTHTGSQKPFQCRICMRNFSDPSNLQRHLRTHTGEKPFQCRICMRNFSRRDNLPKHLKTHTGSQKPFQCRICMRNFSRKDHLKTHLRTHTGEKPFQCRICMRNFSEGGNLMRHLKTHLRGS

SEQ ID NO: 2164 - protein, 176 aa, Synthetic construct
SRPGERPFQCRICMRNFSRRSRLTLHTRTHTGEKPFQCRICMRNFSDSGHLKRHLRTHTGSQKPFQCRICMRNFSSKPNLKMHTRTHTGEKPFQCRICMRNFSRGDNLGRHLRTHTGSQKPFQCRICMRNFSRREVLENHLRTHTGEKPFQCRICMRNFSQSAHLGRHLKTHLRGS

SEQ ID NO: 2165 - protein, 176 aa, Synthetic construct
SRPGERPFQCRICMRNFSTHAHLTRHTRTHTGEKPFQCRICMRNFSRQDNLHTHLRTHTGSQKPFQCRICMRNFSQNANLKRHTRTHTGEKPFQCRICMRNFSQREHLTTHLRTHTGSQKPFQCRICMRNFSDHSSLKRHLRTHTGEKPFQCRICMRNFSQSPHLQRHLKTHLRGS

SEQ ID NO: 2166 - protein, 179 aa, Synthetic construct
SRPGERPFQCRICMRNFSRQDNLGRHLRTHTGEKPFQCRICMRNFSQRNALAGHLKTHTGSQKPFQCRICMRNFSSPSKLARHTRTHTGEKPFQCRICMRNFSQAGNLSRHLRTHTGGGGSQKPFQCRICMRNFSRRQHLELHTRTHTGEKPFQCRICMRNFSDRGNLTRHLRTHLRGS

SEQ ID NO: 2167 - protein, 179 aa, Synthetic construct
SRPGERPFQCRICMRNFSKKDHLHRHTRTHTGEKPFQCRICMRNFSQSAHLKRHLRTHTGGGGSQKPFQCRICMRNFSRREHLMRHLRTHTGEKPFQCRICMRNFSARNTLKGHLKTHTGSQKPFQCRICMRNFSQSGTLHRHLRTHTGEKPFQCRICMRNFSRRDHLLRHLKTHLRGS

SEQ ID NO: 2168 - protein, 176 aa, Synthetic construct
SRPGERPFQCRICMRNFSQSTTLKRHLRTHTGEKPFQCRICMRNFSRRDGLAGHLKTHTGSQKPFQCRICMRNFSRNHNLERHTRTHTGEKPFQCRICMRNFSRREHLTIHLRTHTGSQKPFQCRICMRNFSRRESLTIHLRTHTGEKPFQCRICMRNFSRMDVLSLHLKTHLRGS

SEQ ID NO: 2169 - protein, 176 aa, Synthetic construct
SRPGERPFQCRICMRNFSKKIDLVRHTRTHTGEKPFQCRICMRNFSLKGHLTRHLRTHTGSQKPFQCRICMRNFSRQDNLGRHLRTHTGEKPFQCRICMRNFSVSNTLTRHLKTHTGSQKPFQCRICMRNFSQTQNLTRHLRTHTGEKPFQCRICMRNFSRTEHLARHLKTHLRGS

SEQ ID NO: 2170 - protein, 176 aa, Synthetic construct
SRPGERPFQCRICMRNFSDSSVLRRHLRTHTGEKPFQCRICMRNFSQPHGLRGHLKTHTGSQKPFQCRICMRNFSRQEHLVRHLRTHTGEKPFQCRICMRNFSQHPNLTRHLKTHTGSQKPFQCRICMRNFSRKEHLSIHLRTHTGEKPFQCRICMRNFSDKSHLTRHLKTHLRGS

SEQ ID NO: 2171 - protein, 176 aa, Synthetic construct
SRPGERPFQCRICMRNFSRRDNLHTHLRTHTGEKPFQCRICMRNFSQGGHLKRHLKTHTGSQKPFQCRICMRNFSRQVTLTRHTRTHTGEKPFQCRICMRNFSVRETLVRHLRTHTGSQKPFQCRICMRNFSHKSSLTRHLRTHTGEKPFQCRICMRNFSQSGNLHTHLKTHLRGS

SEQ ID NO: 2172 - protein, 176 aa, Synthetic construct
SRPGERPFQCRICMRNFSQSGTLKRHLRTHTGEKPFQCRICMRNFSKQWYLQLHLKTHTGSQKPFQCRICMRNFSDPSNLQRHLRTHTGEKPFQCRICMRNFSRRDNLPKHLKTHTGSQKPFQCRICMRNFSRRAHLLNHTRTHTGEKPFQCRICMRNFSDRGNLTRHLRTHLRGS

SEQ ID NO: 2173 - protein, 176 aa, Synthetic construct
SRPGERPFQCRICMRNFSDPSTLRRHTRTHTGEKPFQCRICMRNFSLRDSLKRHLRTHTGSQKPFQCRICMRNFSQRSSLVRHLRTHTGEKPFQCRICMRNFSLKHGLTRHLKTHTGSQKPFQCRICMRNFSGHTALRNHTRTHTGEKPFQCRICMRNFSDSGVLKRHLRTHLRGS

SEQ ID NO: 2174 - protein, 176 aa, Synthetic construct
SRPGERPFQCRICMRNFSTAAHLTRHTRTHTGEKPFQCRICMRNFSRQDNLHTHLRTHTGSQKPFQCRICMRNFSLRANLQRHTRTHTGEKPFQCRICMRNFSQREHLNVHLRTHTGSQKPFQCRICMRNFSTSTLLNRHTRTHTGEKPFQCRICMRNFSQSPHLKRHLRTHLRGS

SEQ ID NO: 2175 - protein, 179 aa, Synthetic construct
SRPGERPFQCRICMRNFSRQDNLGRHLRTHTGEKPFQCRICMRNFSQRNTLKGHLKTHTGSQKPFQCRICMRNFSTPSKLDRHTRTHTGEKPFQCRICMRNFSQMSNLDRHLRTHTGGGGSQKPFQCRICMRNFSRKQHLTLHTRTHTGEKPFQCRICMRNFSDRGNLTRHLRTHLRGS

SEQ ID NO: 2176 - protein, 179 aa, Synthetic construct
SRPGERPFQCRICMRNFSRREHLMRHLRTHTGEKPFQCRICMRNFSQTTHLSRHLKTHTGGGGSQKPFQCRICMRNFSRQEHLVRHLRTHTGEKPFQCRICMRNFSARNTLKGHLKTHTGSQKPFQCRICMRNFSQGGTLNRHLRTHTGEKPFQCRICMRNFSRRDHLLRHLKTHLRGS

SEQ ID NO: 2177 - protein, 176 aa, Synthetic construct
SRPGERPFQCRICMRNFSQSTTLKRHLRTHTGEKPFQCRICMRNFSRRDGLAGHLKTHTGSQKPFQCRICMRNFSRQDNLGRHLRTHTGEKPFQCRICMRNFSRMDHLAGHLKTHTGSQKPFQCRICMRNFSRKESLTIHLRTHTGEKPFQCRICMRNFSRMDVLSLHLKTHLRGS

SEQ ID NO: 2178 - protein, 176 aa, Synthetic construct
SRPGERPFQCRICMRNFSKKIDLVRHTRTHTGEKPFQCRICMRNFSLKGHLTRHLRTHTGSQKPFQCRICMRNFSRQDNLGRHLRTHTGEKPFQCRICMRNFSVSNTLSRHLKTHTGSQKPFQCRICMRNFSQTQNLTRHLRTHTGEKPFQCRICMRNFSRTEHLARHLKTHLRGS

SEQ ID NO: 2179 - protein, 176 aa, Synthetic construct
SRPGERPFQCRICMRNFSDSSVLRRHLRTHTGEKPFQCRICMRNFSQAHGLTAHLKTHTGSQKPFQCRICMRNFSRQEHLVRHLRTHTGEKPFQCRICMRNFSQHPNLTRHLKTHTGSQKPFQCRICMRNFSRKEHLVGHLRTHTGEKPFQCRICMRNFSEKSHLTRHLKTHLRGS

SEQ ID NO: 2180 - protein, 176 aa, Synthetic construct
SRPGERPFQCRICMRNFSDRSSLKRHLRTHTGEKPFQCRICMRNFSQHPNLTRHLKTHTGSQKPFQCRICMRNFSQSAHLKRHLRTHTGEKPFQCRICMRNFSRTEHLARHLKTHTGSQKPFQCRICMRNFSRSTHLRVHTRTHTGEKPFQCRICMRNFSHKSSLTRHLRTHLRGS

SEQ ID NO: 2181 - protein, 176 aa, Synthetic construct
SRPGERPFQCRICMRNFSQSGTLKRHLRTHTGEKPFQCRICMRNFSKQWYLQLHLKTHTGSQKPFQCRICMRNFSDRGNLTRHLRTHTGEKPFQCRICMRNFSRKTGLLIHLKTHTGSQKPFQCRICMRNFSRKDHLKTHLRTHTGEKPFQCRICMRNFSEGGNLMRHLKTHLRGS

SEQ ID NO: 2182 - protein, 176 aa, Synthetic construct
SRPGERPFQCRICMRNFSDGSTLRRHTRTHTGEKPFQCRICMRNFSLSQTLKRHLRTHTGSQKPFQCRICMRNFSQNSALHRHTRTHTGEKPFQCRICMRNFSQRHHLDRHLRTHTGSQKPFQCRICMRNFSGRTALKTHTRTHTGEKPFQCRICMRNFSDSGVLKRHLRTHLRGS

SEQ ID NO: 2183 - protein, 176 aa, Synthetic construct
SRPGERPFQCRICMRNFSTHAHLTRHTRTHTGEKPFQCRICMRNFSRRDNLHTHLRTHTGSQKPFQCRICMRNFSLRANLQRHTRTHTGEKPFQCRICMRNFSQREHLNVHLRTHTGSQKPFQCRICMRNFSTSTLLNRHTRTHTGEKPFQCRICMRNFSQSPHLKRHLRTHLRGS

SEQ ID NO: 2184 - protein, 179 aa, Synthetic construct
SRPGERPFQCRICMRNFSRQDNLGRHLRTHTGEKPFQCRICMRNFSQRNALAGHLKTHTGSQKPFQCRICMRNFSSPSKLARHTRTHTGEKPFQCRICMRNFSQMSNLDRHLRTHTGGGGSQKPFQCRICMRNFSRKQHLQLHTRTHTGEKPFQCRICMRNFSDRGNLTRHLRTHLRGS

SEQ ID NO: 2185 - protein, 179 aa, Synthetic construct
SRPGERPFQCRICMRNFSRREHLVRHLRTHTGEKPFQCRICMRNFSQNSHLRRHLKTHTGGGGSQKPFQCRICMRNFSRREHLMRHLRTHTGEKPFQCRICMRNFSARNTLKGHLKTHTGSQKPFQCRICMRNFSQSGTLHRHLRTHTGEKPFQCRICMRNFSRRDHLLRHLKTHLRGS

SEQ ID NO: 2186 - protein, 176 aa, Synthetic construct
SRPGERPFQCRICMRNFSQQTNLTRHLRTHTGEKPFQCRICMRNFSQGGILYRHLKTHTGSQKPFQCRICMRNFSQRGNLARHLRTHTGEKPFQCRICMRNFSTKQWTLGHLKTHTGSQKPFQCRICMRNFSRRQHLQYHTRTHTGEKPFQCRICMRNFSRREHLVRHLRTHLRGS

SEQ ID NO: 2187 - protein, 176 aa, Synthetic construct
SRPGERPFQCRICMRNFSTHAHLTRHTRTHTGEKPFQCRICMRNFSRQDNLHTHLRTHTGSQKPFQCRICMRNFSQNANLKRHTRTHTGEKPFQCRICMRNFSQREHLTTHLRTHTGSQKPFQCRICMRNFSDHSSLKRHLRTHTGEKPFQCRICMRNFSQTTHLSRHLKTHLRGS

SEQ ID NO: 2188 - protein, 176 aa, Synthetic construct
SRPGERPFQCRICMRNFSQRGNLTRHLRTHTGEKPFQCRICMRNFSQSNSLKYHLKTHTGSQKPFQCRICMRNFSQRGNLARHLRTHTGEKPFQCRICMRNFSTKQWTLGHLKTHTGSQKPFQCRICMRNFSRKQHLTLHTRTHTGEKPFQCRICMRNFSRREHLVRHLRTHLRGS

SEQ ID NO: 2189 - protein, 176 aa, Synthetic construct
SRPGERPFQCRICMRNFSRREVLENHLRTHTGEKPFQCRICMRNFSRRDNLLRHLKTHTGSQKPFQCRICMRNFSGGAALAVHTRTHTGEKPFQCRICMRNFSDRSNLTRHLRTHTGSQKPFQCRICMRNFSQREHLKVHLRTHTGEKPFQCRICMRNFSQGGTLRRHLKTHLRGS

SEQ ID NO: 2190 - protein, 176 aa, Synthetic construct
SRPGERPFQCRICMRNFSQLSNLTRHTRTHTGEKPFQCRICMRNFSRREHLVRHLRTHTGSQKPFQCRICMRNFSKGNDLTRHTRTHTGEKPFQCRICMRNFSRREHLVRHLRTHTGSQKPFQCRICMRNFSKGYNLTVHTRTHTGEKPFQCRICMRNFSHQHRLKTHLRTHLRGS

SEQ ID NO: 2191 - protein, 176 aa, Synthetic construct
SRPGERPFQCRICMRNFSRREVLENHLRTHTGEKPFQCRICMRNFSRRDNLLRHLKTHTGSQKPFQCRICMRNFSGGAALAVHTRTHTGEKPFQCRICMRNFSDRSNLTRHLRTHTGSQKPFQCRICMRNFSQNEHLKVHLRTHTGEKPFQCRICMRNFSQGGTLRRHLKTHLRGS

SEQ ID NO: 2192 - protein, 176 aa, Synthetic construct
SRPGERPFQCRICMRNFSDSSVLRRHLRTHTGEKPFQCRICMRNFSQPHGLAHHLKTHTGSQKPFQCRICMRNFSRQEHLVRHLRTHTGEKPFQCRICMRNFSQHPNLTRHLKTHTGSQKPFQCRICMRNFSRKEHLVGHLRTHTGEKPFQCRICMRNFSEKSHLTRHLKTHLRGS

SEQ ID NO: 2193 - protein, 179 aa, Synthetic construct
SRPGERPFQCRICMRNFSQSSSLVRHLRTHTGEKPFQCRICMRNFSQNSHLRRHLKTHTGSQKPFQCRICMRNFSRREVLENHLRTHTGEKPFQCRICMRNFSVKHGLTRHLKTHTGGGGSQKPFQCRICMRNFSHRESLTVHLRTHTGEKPFQCRICMRNFSQTATLKRHLKTHLRGS

SEQ ID NO: 2194 - protein, 176 aa, Synthetic construct
SRPGERPFQCRICMRNFSRRDNLHTHLRTHTGEKPFQCRICMRNFSQGGHLKRHLKTHTGSQKPFQCRICMRNFSRQVTLTRHTRTHTGEKPFQCRICMRNFSVRETLVRHLRTHTGSQKPFQCRICMRNFSHKSSLTRHLRTHTGEKPFQCRICMRNFSQQGNLQLHLKTHLRGS

SEQ ID NO: 2195 - protein, 179 aa, Synthetic construct
SRPGERPFQCRICMRNFSQSSSLVRHLRTHTGEKPFQCRICMRNFSQTTHLARHLKTHTGSQKPFQCRICMRNFSRREVLENHLRTHTGEKPFQCRICMRNFSIRHHLKRHLKTHTGGGGSQKPFQCRICMRNFSHRESLTVHLRTHTGEKPFQCRICMRNFSQTATLKRHLKTHLRGS

SEQ ID NO: 2196 - protein, 176 aa, Synthetic construct
SRPGERPFQCRICMRNFSSRFNLSTHTRTHTGEKPFQCRICMRNFSDASNLRRHLRTHTGSQKPFQCRICMRNFSRKDNLNTHLRTHTGEKPFQCRICMRNFSRTAHLQVHLKTHTGSQKPFQCRICMRNFSQRGNLARHLRTHTGEKPFQCRICMRNFSRNHSLRMHLKTHLRGS

SEQ ID NO: 2197 - protein, 179 aa, Synthetic construct
SRPGERPFQCRICMRNFSRREHLVRHLRTHTGEKPFQCRICMRNFSQNSHLRRHLKTHTGGGGSQKPFQCRICMRNFSRREHLVRHLRTHTGEKPFQCRICMRNFSQRNTLLNHLKTHTGSQKPFQCRICMRNFSQSTTLKRHLRTHTGEKPFQCRICMRNFSRQDNLQRHLKTHLRGS

SEQ ID NO: 2198 - protein, 176 aa, Synthetic construct
SRPGERPFQCRICMRNFSKKFNLQAHTRTHTGEKPFQCRICMRNFSDPSNLARHLRTHTGSQKPFQCRICMRNFSRKDNLNTHLRTHTGEKPFQCRICMRNFSRTAHLQVHLKTHTGSQKPFQCRICMRNFSQRSNLARHTRTHTGEKPFQCRICMRNFSRKESLDVHLRTHLRGS

SEQ ID NO: 2199 - protein, 176 aa, Synthetic construct
SRPGERPFQCRICMRNFSVRSRLKLHTRTHTGEKPFQCRICMRNFSERGHLTRHLRTHTGSQKPFQCRICMRNFSSKPNLKMHTRTHTGEKPFQCRICMRNFSRGDNLGRHLRTHTGSQKPFQCRICMRNFSRNFILQRHTRTHTGEKPFQCRICMRNFSQSAHLKRHLRTHLRGS

SEQ ID NO: 2200 - protein, 179 aa, Synthetic construct
SRPGERPFQCRICMRNFSLKQHLVVHLRTHTGEKPFQCRICMRNFSQAGHLTRHLKTHTGSQKPFQCRICMRNFSDNAHLARHTRTHTGEKPFQCRICMRNFSQKCNLKAHLRTHTGGGGSQKPFQCRICMRNFSQSSSLVRHLRTHTGEKPFQCRICMRNFSRKERLATHLKTHLRGS

SEQ ID NO: 2201 - protein, 179 aa, Synthetic construct
SRPGERPFQCRICMRNFSRATHLTRHTRTHTGEKPFQCRICMRNFSRADVLKGHLRTHTGSQKPFQCRICMRNFSLPHHLKRHLRTHTGEKPFQCRICMRNFSISHNLARHLKTHTGGGGSQKPFQCRICMRNFSTRAVLRRHTRTHTGEKPFQCRICMRNFSQQSSLVRHLRTHLRGS

SEQ ID NO: 2202 - protein, 179 aa, Synthetic construct
SRPGERPFQCRICMRNFSQQTNLTRHLRTHTGEKPFQCRICMRNFSQGGILYRHLKTHTGGGGSQKPFQCRICMRNFSQAGNLSRHLRTHTGEKPFQCRICMRNFSIKHHLGRHLKTHTGSQKPFQCRICMRNFSTRTELNVHTRTHTGEKPFQCRICMRNFSQAGNLRRHLRTHLRGS

SEQ ID NO: 2203 - protein, 179 aa, Synthetic construct
SRPGERPFQCRICMRNFSRADNLGRHLRTHTGEKPFQCRICMRNFSARNTLKGHLKTHTGGGGSQKPFQCRICMRNFSRRRNLTLHTRTHTGEKPFQCRICMRNFSRPHVLANHLRTHTGSQKPFQCRICMRNFSQRSDLTRHLRTHTGEKPFQCRICMRNFSRQDNLQRHLKTHLRGS

SEQ ID NO: 2204 - protein, 179 aa, Synthetic construct
SRPGERPFQCRICMRNFSRSESLTIHLRTHTGEKPFQCRICMRNFSRQGHLKRHLKTHTGSQKPFQCRICMRNFSRPDNLGRHLRTHTGEKPFQCRICMRNFSRRDNLNRHLKTHTGGGGSQKPFQCRICMRNFSQGGTLSRHLRTHTGEKPFQCRICMRNFSRHYRLSTHLKTHLRGS

SEQ ID NO: 2205 - protein, 179 aa, Synthetic construct
SRPGERPFQCRICMRNFSRQDNLGRHLRTHTGEKPFQCRICMRNFSTNHWLLIHLKTHTGGGGSQKPFQCRICMRNFSQQTNLTRHLRTHTGEKPFQCRICMRNFSQTTHLSRHLKTHTGSQKPFQCRICMRNFSKKDHLHRHTRTHTGEKPFQCRICMRNFSQSAHLKRHLRTHLRGS

SEQ ID NO: 2206 - protein, 179 aa, Synthetic construct
SRPGERPFQCRICMRNFSVNHNLVRHLRTHTGEKPFQCRICMRNFSRRDHLLRHLKTHTGGGGSQKPFQCRICMRNFSRKHHLGRHTRTHTGEKPFQCRICMRNFSRREHLTIHLRTHTGSQKPFQCRICMRNFSQSAHLKRHLRTHTGEKPFQCRICMRNFSRSDHLSLHLKTHLRGS

SEQ ID NO: 2207 - protein, 179 aa, Synthetic construct
SRPGERPFQCRICMRNFSHRTNLIAHTRTHTGEKPFQCRICMRNFSRREHLVRHLRTHTGSQKPFQCRICMRNFSVPHNLQRHLRTHTGEKPFQCRICMRNFSRVDNLGRHLKTHTGGGGSQKPFQCRICMRNFSRVDHLHRHLRTHTGEKPFQCRICMRNFSRSDHLSLHLKTHLRGS

SEQ ID NO: 2208 - protein, 179 aa, Synthetic construct
SRPGERPFQCRICMRNFSKHSNLTRHTRTHTGEKPFQCRICMRNFSQQTNLTRHLRTHTGGGGSQKPFQCRICMRNFSRGTVLRRHTRTHTGEKPFQCRICMRNFSRNDALAVHLRTHTGSQKPFQCRICMRNFSTTFNLRVHTRTHTGEKPFQCRICMRNFSQTQNLTRHLRTHLRGS

SEQ ID NO: 2209 - protein, 179 aa, Synthetic construct
SRPGERPFQCRICMRNFSRQANLVRHTRTHTGEKPFQCRICMRNFSQAGNLSRHLRTHTGGGGSQKPFQCRICMRNFSRTFVLKRHTRTHTGEKPFQCRICMRNFSRNDALAVHLRTHTGSQKPFQCRICMRNFSTTFNLRVHTRTHTGEKPFQCRICMRNFSQTQNLTRHLRTHLRGS

SEQ ID NO: 2210 - protein, 179 aa, Synthetic construct
SRPGERPFQCRICMRNFSKHSNLTRHTRTHTGEKPFQCRICMRNFSQQTNLTRHLRTHTGGGGSQKPFQCRICMRNFSRGTVLRRHTRTHTGEKPFQCRICMRNFSRNDALAVHLRTHTGSQKPFQCRICMRNFSQRRYLVEHTRTHTGEKPFQCRICMRNFSQQTNLARHLRTHLRGS

SEQ ID NO: 2211 - protein, 179 aa, Synthetic construct
SRPGERPFQCRICMRNFSHHTSLVRHTRTHTGEKPFQCRICMRNFSQREHLKVHLRTHTGGGGSQKPFQCRICMRNFSQRSNLARHTRTHTGEKPFQCRICMRNFSRKESLDVHLRTHTGSQKPFQCRICMRNFSQQTNLTRHLRTHTGEKPFQCRICMRNFSRPESLAPHLKTHLRGS

SEQ ID NO: 2212 - protein, 179 aa, Synthetic construct
SRPGERPFQCRICMRNFSQSSSLVRHLRTHTGEKPFQCRICMRNFSRKERLATHLKTHTGSQKPFQCRICMRNFSKGDHLRRHTRTHTGEKPFQCRICMRNFSQRCNLLTHLRTHTGGGGSQKPFQCRICMRNFSLPHHLKRHLRTHTGEKPFQCRICMRNFSISHNLARHLKTHLRGS

SEQ ID NO: 2213 - DNA, 6294 bp, Synthetic construct
  source 1..6294: mol_type = other DNA
atgccaaaaaagaagagaaaggtaccgaagaaaaaaagaaaggtcaaccatgatcaagaattcgacccacctaaagtctacccacctgtgcccgccgaaaaaaggaaacccataagggtgctgtcactctttgatggcatcgccactggtctcctggttcttaaggatctgggaattcaggtcgatcggtacattgctagcgaggtttgtgaggatagtattacagtgggtatggtgcgccaccagggaaagatcatgtatgttggtgacgttaggagcgtcacccagaaacatatccaggagtggggaccctttgatttggtgatcggaggtagtccctgcaatgacctttccatcgtgaatccagccaggaaagggctgtatgaagggactggtaggctctttttcgagttttatcgcctgcttcacgacgctagacctaaggaaggtgacgataggcctttcttttggctttttgagaacgtcgtggcaatgggagtctccgacaaaagggacatttctcgctttctggaatctaaccccgttatgatcgatgccaaggaagtttctgccgctcacagggcaaggtacttctggggcaatctgcccggaatgaatcgcccactggccagtaccgtgaatgacaaactggagctgcaggagtgcctggagcacggaagaatcgcaaagttttctaaagtcaggaccattaccactcgcagtaactccataaaacagggtaaggaccagcattttcccgtcttcatgaatgaaaaggaagatattctgtggtgcactgaaatggagagagttttcgggtttcccgtgcactataccgatgtttccaacatgtcccgccttgcaagacaaaggcttttgggccgctcttggtctgtgccagtgatccggcacttgtttgctcccctcaaagagtacttcgcttgcgtcagttccggaaattcaaacgctaactctcggggtccatctttctccagtggtctcgtgccactgtctctccggggctctcacaatcccctggagatgtttgagacagtgccagtctggcggaggcagcccgttcgcgttctctctctgttcgaagatattaaaaaggaactcacctcccttgggttcctggagagcgggagcgaccccggacagcttaagcacgtggtcgacgtgactgacaccgtccgcaaagacgtggaggaatggggccccttcgatctggtctatggggcaacccctccccttgggcatacatgtgatcggcctccatcctggtacctgttccagtttcacagactcctgcagtatgccaggccaaagccagggagcccaaggccctttttctggatgttcgtcgacaacctggtcctgaacaaagaagatctcgacgttgctagtcgctttctcgaaatggagcccgtgaccattcccgacgtgcatggcggttccctccagaatgcagtcagggtttggagcaatatccctgccatcaggtcaaggcactgggcactggtttcagaggaagagctgtccctccttgcccagaacaagcagtcatccaaactggcagccaagtggccaactaagctggtcaagaactgctttcttcccctcagagaatattttaagtatttcagtactgaactgactagcagtctgggagggccgagctctggcgcacccccaccaagtggagggtctcctgccgggtccccaacatctactgaagaaggcaccagcgaatccgcaacgcccgagtcaggccctggtacctccacagaaccatctgaaggtagtgcgcctggttccccagctggaagccctacttccaccgaagaaggcacgtcaaccgaaccaagtgaaggatctgcccctgggaccagcactgaaccatctgagatggacaagaagtacagcatcggcctggccatcggcaccaactctgtgggctgggccgtgatcaccgacgagtacaaggtgcccagcaagaaattcaaggtgctgggcaacaccgaccggcacagcatcaagaagaacctgatcggcgccctgctgttcgacagcggagaaacagccgaggccacccggctgaagagaaccgccagaagaagatacaccagacggaagaaccggatctgctatctgcaagagatcttcagcaacgagatggccaaggtggacgacagcttcttccacagactggaagagtccttcctggtggaagaggataagaagcacgagcggcaccccatcttcggcaacatcgtggacgaggtggcctaccacgagaagtaccccaccatctaccacctgagaaagaaactggtggacagcaccgacaaggccgacctgcggctgatctatctggccctggcccacatgatcaagttccggggccacttcctgatcgagggcgacctgaaccccgacaacagcgacgtggacaagctgttcatccagctggtgcagacctacaaccagctgttcgaggaaaaccccatcaacgccagcggcgtggacgccaaggccatcctgtctgccagactgagcaagagcagacggctggaaaatctgatcgcccagctgcccggcgagaagaagaatggcctgttcggcaacctgattgccctgagcctgggcctgacccccaacttcaagagcaacttcgacctggccgaggatgccaaactgcagctgagcaaggacacctacgacgacgacctggacaacctgctggcccagatcggcgaccagtacgccgacctgtttctggccgccaagaacctgtccgacgccatcctgctgagcgacatcctgagagtgaacaccgagatcaccaaggcccccctgagcgcctctatgatcaagagatacgacgagcaccaccaggacctgaccctgctgaaagctctcgtgcggcagcagctgcctgagaagtacaaagagattttcttcgaccagagcaagaacggctacgccggctacatcgatggcggagccagccaggaagagttctacaagttcatcaagcccatcctggaaaagatggacggcaccgaggaactgctcgtgaagctgaacagagaggacctgctgcggaagcagcggaccttcgacaacggcagcatcccccaccagatccacctgggagagctgcacgccattctgcggcggcaggaagatttttacccattcctgaaggacaaccgggaaaagatcgagaagatcctgaccttccgcatcccctactacgtgggccctctggccaggggaaacagcagattcgcctggatgaccagaaagagcgaggaaaccatcaccccctggaacttcgaggaagtggtggacaagggcgccagcgcccagagcttcatcgagcggatgaccaacttcgataagaacctgcccaacgagaaggtgctgcccaagcacagcctgctgtacgagtacttcaccgtgtacaacgagctgaccaaagtgaaatacgtgaccgagggaatgagaaagcccgccttcctgagcggcgagcagaaaaaagccatcgtggacctgctgttcaagaccaaccggaaagtgaccgtgaagcagctgaaagaggactacttcaagaaaatcgagtgcttcgactccgtggaaatctccggcgtggaagatcggttcaacgcctccctgggcacataccacgatctgctgaaaattatcaaggacaaggacttcctggacaatgaggaaaacgaggacattctggaagatatcgtgctgaccctgacactgtttgaggacagagagatgatcgaggaacggctgaaaacctatgcccacctgttcgacgacaaagtgatgaagcagctgaagcggcggagatacaccggctggggcaggctgagccggaagctgatcaacggcatccgggacaagcagtccggcaagacaatcctggatttcctgaagtccgacggcttcgccaacagaaacttcatgcagctgatccacgacgacagcctgacctttaaagaggacatccagaaagcccaggtgtccggccagggcgatagcctgcacgagcacattgccaatctggccggcagccccgccattaagaagggcatcctgcagacagtgaaggtggtggacgagctcgtgaaagtgatgggccggcacaagcccgagaacatcgtgatcgaaatggccagagagaaccagaccacccagaagggacagaagaacagccgcgagagaatgaagcggatcgaagagggcatcaaagagctgggcagccagatcctgaaagaacaccccgtggaaaacacccagctgcagaacgagaagctgtacctgtactacctgcagaatgggcgggatatgtacgtggaccaggaactggacatcaaccggctgtccgactacgatgtggacgctatcgtgcctcagagctttctgaaggacgactccatcgataacaaagtgctgactcggagcgacaagaaccggggcaagagcgacaacgtgccctccgaagaggtcgtgaagaagatgaagaactactggcgccagctgctgaatgccaagctgattacccagaggaagttcgacaatctgaccaaggccgagagaggcggcctgagcgaactggataaggccggcttcatcaagagacagctggtggaaacccggcagatcacaaagcacgtggcacagatcctggactcccggatgaacactaagtacgacgagaacgacaaactgatccgggaagtgaaagtgatcaccctgaagtccaagctggtgtccgatttccggaaggatttccagttttacaaagtgcgcgagatcaacaactaccaccacgcccacgacgcctacctgaacgccgtcgtgggaaccgccctgatcaaaaagtaccctaagctggaaagcgagttcgtgtacggcgactacaaggtgtacgacgtgcggaagatgatcgccaagagcgagcaggaaatcggcaaggctaccgccaagtacttcttctacagcaacatcatgaactttttcaagaccgagattaccctggccaacggcgagatccggaagcggcctctgatcgagacaaacggcgaaacaggcgagatcgtgtgggataagggccgggactttgccaccgtgcggaaagtgctgtctatgccccaagtgaatatcgtgaaaaagaccgaggtgcagacaggcggcttcagcaaagagtctatcctgcccaagaggaacagcgacaagctgatcgccagaaagaaggactgggaccctaagaagtacggcggcttcgacagccccaccgtggcctattctgtgctggtggtggccaaagtggaaaagggcaagtccaagaaactgaagagtgtgaaagagctgctggggatcaccatcatggaaagaagcagcttcgagaagaatcccatcgactttctggaagccaagggctacaaagaagtgaaaaaggacctgatcatcaagctgcctaagtactccctgttcgagctggaaaacggccggaagagaatgctggcctctgccggcgaactgcagaagggaaacgaactggccctgccctccaaatatgtgaacttcctgtacctggccagccactatgagaagctgaagggctcccccgaggataatgagcagaaacagctgtttgtggaacagcacaaacactacctggacgagatcatcgagcagatcagcgagttctccaagagagtgatcctggccgacgctaatctggacaaggtgctgagcgcctacaacaagcacagagacaagcctatcagagagcaggccgagaatatcatccacctgtttaccctgaccaatctgggagcccctgccgccttcaagtactttgacaccaccatcgaccggaagaggtacaccagcaccaaagaggtgctggacgccaccctgatccaccagagcatcaccggcctgtacgagacacggatcgacctgtctcagctgggaggcgacagcggaagtgagaccccaggtacatccgaatcagcaacgcctgaaagcaccggtcggacactggtgaccttcaaggatgtatttgtggacttcaccagggaggagtggaagctgctggacactgctcagcagatcgtgtacagaaatgtgatgctggagaactataagaacctggtttccttgggttatcagcttactaagccagatgtgatcctccggttggagaagggagaagagcccccaaaaaagaagagaaaggtaccgaagaaaaaaagaaaggtc

SEQ ID NO: 2214 - protein, 2084 aa, Synthetic construct
MNHDQEFDPPKVYPPVPAEKRKPIRVLSLFDGIATGLLVLKDLGIQVDRYIASEVCEDSITVGMVRHQGKIMYVGDVRSVTQKHIQEWGPFDLVIGGSPCNDLSIVNPARKGLYEGTGRLFFEFYRLLHDARPKEGDDRPFFWLFENVVAMGVSDKRDISRFLESNPVMIDAKEVSAAHRARYFWGNLPGMNRPLASTVNDKLELQECLEHGRIAKFSKVRTITTRSNSIKQGKDQHFPVFMNEKEDILWCTEMERVFGFPVHYTDVSNMSRLARQRLLGRSWSVPVIRHLFAPLKEYFACVSSGNSNANSRGPSFSSGLVPLSLRGSHNPLEMFETVPVWRRQPVRVLSLFEDIKKELTSLGFLESGSDPGQLKHVVDVTDTVRKDVEEWGPFDLVYGATPPLGHTCDRPPSWYLFQFHRLLQYARPKPGSPRPFFWMFVDNLVLNKEDLDVASRFLEMEPVTIPDVHGGSLQNAVRVWSNIPAIRSRHWALVSEEELSLLAQNKQSSKLAAKWPTKLVKNCFLPLREYFKYFSTELTSSLGGPSSGAPPPSGGSPAGSPTSTEEGTSESATPESGPGTSTEPSEGSAPGSPAGSPTSTEEGTSTEPSEGSAPGTSTEPSEPKKKRKVMDKKYSIGLAIGTNSVGWAVITDEYKVPSKKFKVLGNTDRHSIKKNLIGALLFDSGETAEATRLKRTARRRYTRRKNRICYLQEIFSNEMAKVDDSFFHRLEESFLVEEDKKHERHPIFGNIVDEVAYHEKYPTIYHLRKKLVDSTDKADLRLIYLALAHMIKFRGHFLIEGDLNPDNSDVDKLFIQLVQTYNQLFEENPINASGVDAKAILSARLSKSRRLENLIAQLPGEKKNGLFGNLIALSLGLTPNFKSNFDLAEDAKLQLSKDTYDDDLDNLLAQIGDQYADLFLAAKNLSDAILLSDILRVNTEITKAPLSASMIKRYDEHHQDLTLLKALVRQQLPEKYKEIFFDQSKNGYAGYIDGGASQEEFYKFIKPILEKMDGTEELLVKLNREDLLRKQRTFDNGSIPHQIHLGELHAILRRQEDFYPFLKDNREKIEKILTFRIPYYVGPLARGNSRFAWMTRKSEETITPWNFEEVVDKGASAQSFIERMTNFDKNLPNEKVLPKHSLLYEYFTVYNELTKVKYVTEGMRKPAFLSGEQKKAIVDLLFKTNRKVTVKQLKEDYFKKIECFDSVEISGVEDRFNASLGTYHDLLKIIKDKDFLDNEENEDILEDIVLTLTLFEDREMIEERLKTYAHLFDDKVMKQLKRRRYTGWGRLSRKLINGIRDKQSGKTILDFLKSDGFANRNFMQLIHDDSLTFKEDIQKAQVSGQGDSLHEHIANLAGSPAIKKGILQTVKVVDELVKVMGRHKPENIVIEMARENQTTQKGQKNSRERMKRIEEGIKELGSQILKEHPVENTQLQNEKLYLYYLQNGRDMYVDQELDINRLSDYDVDAIVPQSFLKDDSIDNKVLTRSDKNRGKSDNVPSEEVVKKMKNYWRQLLNAKLITQRKFDNLTKAERGGLSELDKAGFIKRQLVETRQITKHVAQILDSRMNTKYDENDKLIREVKVITLKSKLVSDFRKDFQFYKVREINNYHHAHDAYLNAVVGTALIKKYPKLESEFVYGDYKVYDVRKMIAKSEQEIGKATAKYFFYSNIMNFFKTEITLANGEIRKRPLIETNGETGEIVWDKGRDFATVRKVLSMPQVNIVKKTEVQTGGFSKESILPKRNSDKLIARKKDWDPKKYGGFDSPTVAYSVLVVAKVEKGKSKKLKSVKELLGITIMERSSFEKNPIDFLEAKGYKEVKKDLIIKLPKYSLFELENGRKRMLASAGELQKGNELALPSKYVNFLYLASHYEKLKGSPEDNEQKQLFVEQHKHYLDEIIEQISEFSKRVILADANLDKVLSAYNKHRDKPIREQAENIIHLFTLTNLGAPAAFKYFDTTIDRKRYTSTKEVLDATLIHQSITGLYETRIDLSQLGGDPKKKRKVSGSETPGTSESATPESTGRTLVTFKDVFVDFTREEWKLLDTAQQIVYRNVMLENYKNLVSLGYQLTKPDVILRLEKGEEP

SEQ ID NO: 2215 - DNA, 6252 bp, Synthetic construct
  source 1..6252: mol_type = other DNA
atgaaccacgaccaggaatttgaccctccaaaggtttacccacctgtcccagctgagaagaggaagcccatccgggtgctgtctctctttgatggaatcgctacagggctcctggtgctgaaggacttgggcattcaggtggaccgctacattgcctcggaggtgtgtgaggactccatcacggtgggcatggtgcggcaccaggggaagatcatgtacgtcggggacgtccgcagcgtcacacagaagcatatccaggagtggggcccattcgatctggtgattgggggcagtccctgcaatgacctctccatcgtcaaccctgctcgcaagggcctctacgagggcactggccggctcttctttgagttctaccgcctcctgcatgatgcgcggcccaaggagggagatgatcgccccttcttctggctctttgagaatgtggtggccatgggcgttagtgacaagagggacatctcgcgatttctcgagtccaaccctgtgatgattgatgccaaagaagtgtcagctgcacacagggcccgctacttctggggtaaccttcccggtatgaacaggccgttggcatccactgtgaatgataagctggagctgcaggagtgtctggagcatggcaggatagccaagttcagcaaagtgaggaccattactacgaggtcaaactccataaagcagggcaaagaccagcattttcctgtcttcatgaatgagaaagaggacatcttatggtgcactgaaatggaaagggtatttggtttcccagtccactatactgacgtctccaacatgagccgcttggcgaggcagagactgctgggccggtcatggagcgtgccagtcatccgccacctcttcgctccgctgaaggagtattttgcgtgtgtgtctagcggcaatagtaacgctaacagccgcgggccgagcttcagcagcggcctggtgccgttaagcttgcgcggcagccataatccccttgagatgttcgaaaccgtgcctgtgtggaggagacagccagtccgggtgctgtccctttttgaagacatcaagaaagagctgacgagtttgggctttttggaaagtggttctgacccgggacaactgaagcatgtggttgatgtcacagacacagtgaggaaggatgtggaggagtggggacccttcgatcttgtgtacggcgccacacctcccctgggccacacctgtgaccgtcctcccagctggtacctgttccagttccaccggctcctgcagtacgcacggcccaagccaggcagccccaggcccttcttctggatgttcgtggacaatctggtgctgaacaaggaagacctggacgtcgcatctcgcttcctggagatggagccagtcaccatcccagatgtccacggcggatccttgcagaatgctgtccgcgtgtggagcaacatcccagccataaggagcaggcactgggctctggtttcggaagaagaattgtccctgctggcccagaacaagcagagctcgaagctcgcggccaagtggcccaccaagctggtgaagaactgctttctccccctaagagaatatttcaagtatttttcaacagaactcacttcctctttaggagggccgagctctggcgcacccccaccaagtggagggtctcctgccgggtccccaacatctactgaagaaggcaccagcgaatccgcaacgcccgagtcaggccctggtacctccacagaaccatctgaaggtagtgcgcctggttccccagctggaagccctacttccaccgaagaaggcacgtcaaccgaaccaagtgaaggatctgcccctgggaccagcactgaaccatctgagccaaaaaagaagagaaaggtaatggacaagaagtacagcatcggcctggccatcggcaccaactctgtgggctgggccgtgatcaccgacgagtacaaggtgcccagcaagaaattcaaggtgctgggcaacaccgaccggcacagcatcaagaagaacctgatcggcgccctgctgttcgacagcggagaaacagccgaggccacccggctgaagagaaccgccagaagaagatacaccagacggaagaaccggatctgctatctgcaagagatcttcagcaacgagatggccaaggtggacgacagcttcttccacagactggaagagtccttcctggtggaagaggataagaagcacgagcggcaccccatcttcggcaacatcgtggacgaggtggcctaccacgagaagtaccccaccatctaccacctgagaaagaaactggtggacagcaccgacaaggccgacctgcggctgatctatctggccctggcccacatgatcaagttccggggccacttcctgatcgagggcgacctgaaccccgacaacagcgacgtggacaagctgttcatccagctggtgcagacctacaaccagctgttcgaggaaaaccccatcaacgccagcggcgtggacgccaaggccatcctgtctgccagactgagcaagagcagacggctggaaaatctgatcgcccagctgcccggcgagaagaagaatggcctgttcggcaacctgattgccctgagcctgggcctgacccccaacttcaagagcaacttcgacctggccgaggatgccaaactgcagctgagcaaggacacctacgacgacgacctggacaacctgctggcccagatcggcgaccagtacgccgacctgtttctggccgccaagaacctgtccgacgccatcctgctgagcgacatcctgagagtgaacaccgagatcaccaaggcccccctgagcgcctctatgatcaagagatacgacgagcaccaccaggacctgaccctgctgaaagctctcgtgcggcagcagctgcctgagaagtacaaagagattttcttcgaccagagcaagaacggctacgccggctacatcgatggcggagccagccaggaagagttctacaagttcatcaagcccatcctggaaaagatggacggcaccgaggaactgctcgtgaagctgaacagagaggacctgctgcggaagcagcggaccttcgacaacggcagcatcccccaccagatccacctgggagagctgcacgccattctgcggcggcaggaagatttttacccattcctgaaggacaaccgggaaaagatcgagaagatcctgaccttccgcatcccctactacgtgggccctctggccaggggaaacagcagattcgcctggatgaccagaaagagcgaggaaaccatcaccccctggaacttcgaggaagtggtggacaagggcgccagcgcccagagcttcatcgagcggatgaccaacttcgataagaacctgcccaacgagaaggtgctgcccaagcacagcctgctgtacgagtacttcaccgtgtacaacgagctgaccaaagtgaaatacgtgaccgagggaatgagaaagcccgccttcctgagcggcgagcagaaaaaagccatcgtggacctgctgttcaagaccaaccggaaagtgaccgtgaagcagctgaaagaggactacttcaagaaaatcgagtgcttcgactccgtggaaatctccggcgtggaagatcggttcaacgcctccctgggcacataccacgatctgctgaaaattatcaaggacaaggacttcctggacaatgaggaaaacgaggacattctggaagatatcgtgctgaccctgacactgtttgaggacagagagatgatcgaggaacggctgaaaacctatgcccacctgttcgacgacaaagtgatgaagcagctgaagcggcggagatacaccggctggggcaggctgagccggaagctgatcaacggcatccgggacaagcagtccggcaagacaatcctggatttcctgaagtccgacggcttcgccaacagaaacttcatgcagctgatccacgacgacagcctgacctttaaagaggacatccagaaagcccaggtgtccggccagggcgatagcctgcacgagcacattgccaatctggccggcagccccgccattaagaagggcatcctgcagacagtgaaggtggtggacgagctcgtgaaagtgatgggccggcacaagcccgagaacatcgtgatcgaaatggccagagagaaccagaccacccagaagggacagaagaacagccgcgagagaatgaagcggatcgaagagggcatcaaagagctgggcagccagatcctgaaagaacaccccgtggaaaacacccagctgcagaacgagaagctgtacctgtactacctgcagaatgggcgggatatgtacgtggaccaggaactggacatcaaccggctgtccgactacgatgtggacgctatcgtgcctcagagctttctgaaggacgactccatcgataacaaagtgctgactcggagcgacaagaaccggggcaagagcgacaacgtgccctccgaagaggtcgtgaagaagatgaagaactactggcgccagctgctgaatgccaagctgattacccagaggaagttcgacaatctgaccaaggccgagagaggcggcctgagcgaactggataaggccggcttcatcaagagacagctggtggaaacccggcagatcacaaagcacgtggcacagatcctggactcccggatgaacactaagtacgacgagaacgacaaactgatccgggaagtgaaagtgatcaccctgaagtccaagctggtgtccgatttccggaaggatttccagttttacaaagtgcgcgagatcaacaactaccaccacgcccacgacgcctacctgaacgccgtcgtgggaaccgccctgatcaaaaagtaccctaagctggaaagcgagttcgtgtacggcgactacaaggtgtacgacgtgcggaagatgatcgccaagagcgagcaggaaatcggcaaggctaccgccaagtacttcttctacagcaacatcatgaactttttcaagaccgagattaccctggccaacggcgagatccggaagcggcctctgatcgagacaaacggcgaaacaggcgagatcgtgtgggataagggccgggactttgccaccgtgcggaaagtgctgtctatgccccaagtgaatatcgtgaaaaagaccgaggtgcagacaggcggcttcagcaaagagtctatcctgcccaagaggaacagcgacaagctgatcgccagaaagaaggactgggaccctaagaagtacggcggcttcgacagccccaccgtggcctattctgtgctggtggtggccaaagtggaaaagggcaagtccaagaaactgaagagtgtgaaagagctgctggggatcaccatcatggaaagaagcagcttcgagaagaatcccatcgactttctggaagccaagggctacaaagaagtgaaaaaggacctgatcatcaagctgcctaagtactccctgttcgagctggaaaacggccggaagagaatgctggcctctgccggcgaactgcagaagggaaacgaactggccctgccctccaaatatgtgaacttcctgtacctggccagccactatgagaagctgaagggctcccccgaggataatgagcagaaacagctgtttgtggaacagcacaaacactacctggacgagatcatcgagcagatcagcgagttctccaagagagtgatcctggccgacgctaatctggacaaggtgctgagcgcctacaacaagcacagagacaagcctatcagagagcaggccgagaatatcatccacctgtttaccctgaccaatctgggagcccctgccgccttcaagtactttgacaccaccatcgaccggaagaggtacaccagcaccaaagaggtgctggacgccaccctgatccaccagagcatcaccggcctgtacgagacacggatcgacctgtctcagctgggaggcgacccaaaaaagaagagaaaggtaagcggaagtgagaccccaggtacatccgaatcagcaacgcctgaaagcaccggtcggacactggtgaccttcaaggatgtatttgtggacttcaccagggaggagtggaagctgctggacactgctcagcagatcgtgtacagaaatgtgatgctggagaactataagaacctggtttccttgggttatcagcttactaagccagatgtgatcctccggttggagaagggagaagagccc

SEQ ID NO: 2216 - protein, 2219 aa, Synthetic construct
MNHDQEFDPPKVYPPVPAEKRKPIRVLSLFDGIATGLLVLKDLGIQVDRYIASEVCEDSITVGMVRHQGKIMYVGDVRSVTQKHIQEWGPFDLVIGGSPCNDLSIVNPARKGLYEGTGRLFFEFYRLLHDARPKEGDDRPFFWLFENVVAMGVSDKRDISRFLESNPVMIDAKEVSAAHRARYFWGNLPGMNRPLASTVNDKLELQECLEHGRIAKFSKVRTITTRSNSIKQGKDQHFPVFMNEKEDILWCTEMERVFGFPVHYTDVSNMSRLARQRLLGRSWSVPVIRHLFAPLKEYFACVSSGNSNANSRGPSFSSGLVPLSLRGSHMEVKVNRRSIEDICLCCGTLQVYTRHPLFEGGLCAPCKDKFLESLFLYDDDGHQSYCTICCSGGTLFICESPDCTRCYCFECVDILVGPGTSERINAMACWVCFLCLPFSRSGLLQRRKRWRHQLKAFHDQEGAGPMEIYKTVSAWKRQPVRVLSLFRNIDKVLKSLGFLESGSGSGGGTLKYVEDVTNVVRRDVEKWGPFDLVYGSTQPLGSSCDRCPGWYMFQFHRILQYALPRQESQRPFFWIFMDNLLLTEDDQETTTRFLQTEAVTLQDVRGRDYQNAMRVWSNIPGLKSKHAPLTPKEEEYLQAQVRSRSKLDAPKVDLLVKNCLLPLREYFKYFSQNSLPLGGPSSGAPPPSGGSPAGSPTSTEEGTSESATPESGPGTSTEPSEGSAPGSPAGSPTSTEEGTSTEPSEGSAPGTSTEPSEPKKKRKVMDKKYSIGLAIGTNSVGWAVITDEYKVPSKKFKVLGNTDRHSIKKNLIGALLFDSGETAEATRLKRTARRRYTRRKNRICYLQEIFSNEMAKVDDSFFHRLEESFLVEEDKKHERHPIFGNIVDEVAYHEKYPTIYHLRKKLVDSTDKADLRLIYLALAHMIKFRGHFLIEGDLNPDNSDVDKLFIQLVQTYNQLFEENPINASGVDAKAILSARLSKSRRLENLIAQLPGEKKNGLFGNLIALSLGLTPNFKSNFDLAEDAKLQLSKDTYDDDLDNLLAQIGDQYADLFLAAKNLSDAILLSDILRVNTEITKAPLSASMIKRYDEHHQDLTLLKALVRQQLPEKYKEIFFDQSKNGYAGYIDGGASQEEFYKFIKPILEKMDGTEELLVKLNREDLLRKQRTFDNGSIPHQIHLGELHAILRRQEDFYPFLKDNREKIEKILTFRIPYYVGPLARGNSRFAWMTRKSEETITPWNFEEVVDKGASAQSFIERMTNFDKNLPNEKVLPKHSLLYEYFTVYNELTKVKYVTEGMRKPAFLSGEQKKAIVDLLFKTNRKVTVKQLKEDYFKKIECFDSVEISGVEDRFNASLGTYHDLLKIIKDKDFLDNEENEDILEDIVLTLTLFEDREMIEERLKTYAHLFDDKVMKQLKRRRYTGWGRLSRKLINGIRDKQSGKTILDFLKSDGFANRNFMQLIHDDSLTFKEDIQKAQVSGQGDSLHEHIANLAGSPAIKKGILQTVKVVDELVKVMGRHKPENIVIEMARENQTTQKGQKNSRERMKRIEEGIKELGSQILKEHPVENTQLQNEKLYLYYLQNGRDMYVDQELDINRLSDYDVDAIVPQSFLKDDSIDNKVLTRSDKNRGKSDNVPSEEVVKKMKNYWRQLLNAKLITQRKFDNLTKAERGGLSELDKAGFIKRQLVETRQITKHVAQILDSRMNTKYDENDKLIREVKVITLKSKLVSDFRKDFQFYKVREINNYHHAHDAYLNAVVGTALIKKYPKLESEFVYGDYKVYDVRKMIAKSEQEIGKATAKYFFYSNIMNFFKTEITLANGEIRKRPLIETNGETGEIVWDKGRDFATVRKVLSMPQVNIVKKTEVQTGGFSKESILPKRNSDKLIARKKDWDPKKYGGFDSPTVAYSVLVVAKVEKGKSKKLKSVKELLGITIMERSSFEKNPIDFLEAKGYKEVKKDLIIKLPKYSLFELENGRKRMLASAGELQKGNELALPSKYVNFLYLASHYEKLKGSPEDNEQKQLFVEQHKHYLDEIIEQISEFSKRVILADANLDKVLSAYNKHRDKPIREQAENIIHLFTLTNLGAPAAFKYFDTTIDRKRYTSTKEVLDATLIHQSITGLYETRIDLSQLGGDPKKKRKVSGSETPGTSESATPESTGRTLVTFKDVFVDFTREEWKLLDTAQQIVYRNVMLENYKNLVSLGYQLTKPDVILRLEKGEEP

SEQ ID NO: 2217 - DNA, 6657 bp, Synthetic construct
  source 1..6657: mol_type = other DNA
atgaaccatgaccaggaatttgaccccccaaaggtttacccacctgtgccagctgagaagaggaagcccatccgcgtgctgtctctctttgatgggattgctacagggctcctggtgctgaaggacctgggcatccaagtggaccgctacattgcctccgaggtgtgtgaggactccatcacggtgggcatggtgcggcaccagggaaagatcatgtacgtcggggacgtccgcagcgtcacacagaagcatatccaggagtggggcccattcgacctggtgattggaggcagtccctgcaatgacctctccattgtcaaccctgcccgcaagggactttatgagggtactggccgcctcttctttgagttctaccgcctcctgcatgatgcgcggcccaaggagggagatgatcgccccttcttctggctctttgagaatgtggtggccatgggcgttagtgacaagagggacatctcgcgatttcttgagtctaaccccgtgatgattgacgccaaagaagtgtctgctgcacacagggcccgttacttctggggtaaccttcctggcatgaacaggcctttggcatccactgtgaatgataagctggagctgcaagagtgtctggagcacggcagaatagccaagttcagcaaagtgaggaccattaccaccaggtcaaactctataaagcagggcaaagaccagcatttccccgtcttcatgaacgagaaggaggacatcctgtggtgcactgaaatggaaagggtgtttggcttccccgtccactacacagacgtctccaacatgagccgcttggcgaggcagagactgctgggccgatcgtggagcgtgccggtcatccgccacctcttcgctccgctgaaggaatattttgcttgtgtgtctagcggcaatagtaacgctaacagccgcgggccgagcttcagcagcggcctggtgccgttaagcttgcgcggcagccatatggaagtcaaagtgaaccgacggagcattgaagacatctgcctctgctgtggaactctccaggtgtacactcggcaccccttgtttgagggagggttatgtgccccatgtaaggataagttcctggagtccctcttcctgtatgatgatgatggacaccagagttactgcaccatctgctgttccgggggtaccctgttcatctgtgagagccccgactgtaccagatgctactgtttcgagtgtgtggacatcctggtgggccccgggacctcagagaggatcaatgccatggcctgctgggtttgcttcctgtgcctgcccttctcacggagtggactgctgcagaggcgcaagaggtggcggcaccagctgaaggccttccatgatcaagagggagcgggccctatggagatatacaagacagtgtctgcatggaagagacagccagtgcgggtactgagcctcttcagaaacatcgacaaggtactaaagagtttgggcttcttggaaagcggttctggttctgggggaggaacgctgaagtacgtggaagatgtcacaaatgtcgtgaggagagacgtggagaaatggggcccctttgacctggtgtacggctcgacgcagcccctaggcagctcttgtgatcgctgtcccggctggtacatgttccagttccaccggatcctgcagtatgcgctgcctcgccaggagagtcagcggcccttcttctggatattcatggacaatctgctgctgactgaggatgaccaagagacaactacccgcttccttcagacagaggctgtgaccctccaggatgtccgtggcagagactaccagaatgctatgcgggtgtggagcaacattccagggctgaagagcaagcatgcgcccctgaccccaaaggaagaagagtatctgcaagcccaagtcagaagcaggagcaagctggacgccccgaaagttgacctcctggtgaagaactgccttctcccgctgagagagtacttcaagtatttttctcaaaactcacttcctcttggagggccgagctctggcgcacccccaccaagtggagggtctcctgccgggtccccaacatctactgaagaaggcaccagcgaatccgcaacgcccgagtcaggccctggtacctccacagaaccatctgaaggtagtgcgcctggttccccagctggaagccctacttccaccgaagaaggcacgtcaaccgaaccaagtgaaggatctgcccctgggaccagcactgaaccatctgagccaaaaaagaagagaaaggtaatggacaagaagtacagcatcggcctggccatcggcaccaactctgtgggctgggccgtgatcaccgacgagtacaaggtgcccagcaagaaattcaaggtgctgggcaacaccgaccggcacagcatcaagaagaacctgatcggcgccctgctgttcgacagcggagaaacagccgaggccacccggctgaagagaaccgccagaagaagatacaccagacggaagaaccggatctgctatctgcaagagatcttcagcaacgagatggccaaggtggacgacagcttcttccacagactggaagagtccttcctggtggaagaggataagaagcacgagcggcaccccatcttcggcaacatcgtggacgaggtggcctaccacgagaagtaccccaccatctaccacctgagaaagaaactggtggacagcaccgacaaggccgacctgcggctgatctatctggccctggcccacatgatcaagttccggggccacttcctgatcgagggcgacctgaaccccgacaacagcgacgtggacaagctgttcatccagctggtgcagacctacaaccagctgttcgaggaaaaccccatcaacgccagcggcgtggacgccaaggccatcctgtctgccagactgagcaagagcagacggctggaaaatctgatcgcccagctgcccggcgagaagaagaatggcctgttcggcaacctgattgccctgagcctgggcctgacccccaacttcaagagcaacttcgacctggccgaggatgccaaactgcagctgagcaaggacacctacgacgacgacctggacaacctgctggcccagatcggcgaccagtacgccgacctgtttctggccgccaagaacctgtccgacgccatcctgctgagcgacatcctgagagtgaacaccgagatcaccaaggcccccctgagcgcctctatgatcaagagatacgacgagcaccaccaggacctgaccctgctgaaagctctcgtgcggcagcagctgcctgagaagtacaaagagattttcttcgaccagagcaagaacggctacgccggctacatcgatggcggagccagccaggaagagttctacaagttcatcaagcccatcctggaaaagatggacggcaccgaggaactgctcgtgaagctgaacagagaggacctgctgcggaagcagcggaccttcgacaacggcagcatcccccaccagatccacctgggagagctgcacgccattctgcggcggcaggaagatttttacccattcctgaaggacaaccgggaaaagatcgagaagatcctgaccttccgcatcccctactacgtgggccctctggccaggggaaacagcagattcgcctggatgaccagaaagagcgaggaaaccatcaccccctggaacttcgaggaagtggtggacaagggcgccagcgcccagagcttcatcgagcggatgaccaacttcgataagaacctgcccaacgagaaggtgctgcccaagcacagcctgctgtacgagtacttcaccgtgtacaacgagctgaccaaagtgaaatacgtgaccgagggaatgagaaagcccgccttcctgagcggcgagcagaaaaaagccatcgtggacctgctgttcaagaccaaccggaaagtgaccgtgaagcagctgaaagaggactacttcaagaaaatcgagtgcttcgactccgtggaaatctccggcgtggaagatcggttcaacgcctccctgggcacataccacgatctgctgaaaattatcaaggacaaggacttcctggacaatgaggaaaacgaggacattctggaagatatcgtgctgaccctgacactgtttgaggacagagagatgatcgaggaacggctgaaaacctatgcccacctgttcgacgacaaagtgatgaagcagctgaagcggcggagatacaccggctggggcaggctgagccggaagctgatcaacggcatccgggacaagcagtccggcaagacaatcctggatttcctgaagtccgacggcttcgccaacagaaacttcatgcagctgatccacgacgacagcctgacctttaaagaggacatccagaaagcccaggtgtccggccagggcgatagcctgcacgagcacattgccaatctggccggcagccccgccattaagaagggcatcctgcagacagtgaaggtggtggacgagctcgtgaaagtgatgggccggcacaagcccgagaacatcgtgatcgaaatggccagagagaaccagaccacccagaagggacagaagaacagccgcgagagaatgaagcggatcgaagagggcatcaaagagctgggcagccagatcctgaaagaacaccccgtggaaaacacccagctgcagaacgagaagctgtacctgtactacctgcagaatgggcgggatatgtacgtggaccaggaactggacatcaaccggctgtccgactacgatgtggacgctatcgtgcctcagagctttctgaaggacgactccatcgataacaaagtgctgactcggagcgacaagaaccggggcaagagcgacaacgtgccctccgaagaggtcgtgaagaagatgaagaactactggcgccagctgctgaatgccaagctgattacccagaggaagttcgacaatctgaccaaggccgagagaggcggcctgagcgaactggataaggccggcttcatcaagagacagctggtggaaacccggcagatcacaaagcacgtggcacagatcctggactcccggatgaacactaagtacgacgagaacgacaaactgatccgggaagtgaaagtgatcaccctgaagtccaagctggtgtccgatttccggaaggatttccagttttacaaagtgcgcgagatcaacaactaccaccacgcccacgacgcctacctgaacgccgtcgtgggaaccgccctgatcaaaaagtaccctaagctggaaagcgagttcgtgtacggcgactacaaggtgtacgacgtgcggaagatgatcgccaagagcgagcaggaaatcggcaaggctaccgccaagtacttcttctacagcaacatcatgaactttttcaagaccgagattaccctggccaacggcgagatccggaagcggcctctgatcgagacaaacggcgaaacaggcgagatcgtgtgggataagggccgggactttgccaccgtgcggaaagtgctgtctatgccccaagtgaatatcgtgaaaaagaccgaggtgcagacaggcggcttcagcaaagagtctatcctgcccaagaggaacagcgacaagctgatcgccagaaagaaggactgggaccctaagaagtacggcggcttcgacagccccaccgtggcctattctgtgctggtggtggccaaagtggaaaagggcaagtccaagaaactgaagagtgtgaaagagctgctggggatcaccatcatggaaagaagcagcttcgagaagaatcccatcgactttctggaagccaagggctacaaagaagtgaaaaaggacctgatcatcaagctgcctaagtactccctgttcgagctggaaaacggccggaagagaatgctggcctctgccggcgaactgcagaagggaaacgaactggccctgccctccaaatatgtgaacttcctgtacctggccagccactatgagaagctgaagggctcccccgaggataatgagcagaaacagctgtttgtggaacagcacaaacactacctggacgagatcatcgagcagatcagcgagttctccaagagagtgatcctggccgacgctaatctggacaaggtgctgagcgcctacaacaagcacagagacaagcctatcagagagcaggccgagaatatcatccacctgtttaccctgaccaatctgggagcccctgccgccttcaagtactttgacaccaccatcgaccggaagaggtacaccagcaccaaagaggtgctggacgccaccctgatccaccagagcatcaccggcctgtacgagacacggatcgacctgtctcagctgggaggcgacccaaaaaagaagagaaaggtaagcggaagtgagaccccaggtacatccgaatcagcaacgcctgaaagcaccggtcggacactggtgaccttcaaggatgtatttgtggacttcaccagggaggagtggaagctgctggacactgctcagcagatcgtgtacagaaatgtgatgctggagaactataagaacctggtttccttgggttatcagcttactaagccagatgtgatcctccggttggagaagggagaagagccc

SEQ ID NO: 2218 - protein, 2218 aa, Synthetic construct
MNHDQEFDPPKVYPPVPAEKRKPIRVLSLFDGIATGLLVLKDLGIQVDRYIASEVCEDSITVGMVRHQGKIMYVGDVRSVTQKHIQEWGPFDLVIGGSPCNDLSIVNPARKGLYEGTGRLFFEFYRLLHDARPKEGDDRPFFWLFENVVAMGVSDKRDISRFLESNPVMIDAKEVSAAHRARYFWGNLPGMNRPLASTVNDKLELQECLEHGRIAKFSKVRTITTRSNSIKQGKDQHFPVFMNEKEDILWCTEMERVFGFPVHYTDVSNMSRLARQRLLGRSWSVPVIRHLFAPLKEYFACVSSGNSNANSRGPSFSSGLVPLSLRGSHMEVKANQRNIEDICICCGSLQVHTQHPLFEGGICAPCKDKFLDALFLYDDDGYQSYCSICCSGETLLICGNPDCTRCYCFECVDSLVGPGTSGKVHAMSNWVCYLCLPSSRSGLLQRRRKWRSQLKAFYDRESENPLEMFETVPVWRRQPVRVLSLFEDIKKELTSLGFLESGSDPGQLKHVVDVTDTVRKDVEEWGPFDLVYGATPPLGHTCDRPPSWYLFQFHRLLQYARPKPGSPRPFFWMFVDNLVLNKEDLDVASRFLEMEPVTIPDVHGGSLQNAVRVWSNIPAIRSRHWALVSEEELSLLAQNKQSSKLAAKWPTKLVKNCFLPLREYFKYFSTELTSSLGGPSSGAPPPSGGSPAGSPTSTEEGTSESATPESGPGTSTEPSEGSAPGSPAGSPTSTEEGTSTEPSEGSAPGTSTEPSEPKKKRKVMDKKYSIGLAIGTNSVGWAVITDEYKVPSKKFKVLGNTDRHSIKKNLIGALLFDSGETAEATRLKRTARRRYTRRKNRICYLQEIFSNEMAKVDDSFFHRLEESFLVEEDKKHERHPIFGNIVDEVAYHEKYPTIYHLRKKLVDSTDKADLRLIYLALAHMIKFRGHFLIEGDLNPDNSDVDKLFIQLVQTYNQLFEENPINASGVDAKAILSARLSKSRRLENLIAQLPGEKKNGLFGNLIALSLGLTPNFKSNFDLAEDAKLQLSKDTYDDDLDNLLAQIGDQYADLFLAAKNLSDAILLSDILRVNTEITKAPLSASMIKRYDEHHQDLTLLKALVRQQLPEKYKEIFFDQSKNGYAGYIDGGASQEEFYKFIKPILEKMDGTEELLVKLNREDLLRKQRTFDNGSIPHQIHLGELHAILRRQEDFYPFLKDNREKIEKILTFRIPYYVGPLARGNSRFAWMTRKSEETITPWNFEEVVDKGASAQSFIERMTNFDKNLPNEKVLPKHSLLYEYFTVYNELTKVKYVTEGMRKPAFLSGEQKKAIVDLLFKTNRKVTVKQLKEDYFKKIECFDSVEISGVEDRFNASLGTYHDLLKIIKDKDFLDNEENEDILEDIVLTLTLFEDREMIEERLKTYAHLFDDKVMKQLKRRRYTGWGRLSRKLINGIRDKQSGKTILDFLKSDGFANRNFMQLIHDDSLTFKEDIQKAQVSGQGDSLHEHIANLAGSPAIKKGILQTVKVVDELVKVMGRHKPENIVIEMARENQTTQKGQKNSRERMKRIEEGIKELGSQILKEHPVENTQLQNEKLYLYYLQNGRDMYVDQELDINRLSDYDVDAIVPQSFLKDDSIDNKVLTRSDKNRGKSDNVPSEEVVKKMKNYWRQLLNAKLITQRKFDNLTKAERGGLSELDKAGFIKRQLVETRQITKHVAQILDSRMNTKYDENDKLIREVKVITLKSKLVSDFRKDFQFYKVREINNYHHAHDAYLNAVVGTALIKKYPKLESEFVYGDYKVYDVRKMIAKSEQEIGKATAKYFFYSNIMNFFKTEITLANGEIRKRPLIETNGETGEIVWDKGRDFATVRKVLSMPQVNIVKKTEVQTGGFSKESILPKRNSDKLIARKKDWDPKKYGGFDSPTVAYSVLVVAKVEKGKSKKLKSVKELLGITIMERSSFEKNPIDFLEAKGYKEVKKDLIIKLPKYSLFELENGRKRMLASAGELQKGNELALPSKYVNFLYLASHYEKLKGSPEDNEQKQLFVEQHKHYLDEIIEQISEFSKRVILADANLDKVLSAYNKHRDKPIREQAENIIHLFTLTNLGAPAAFKYFDTTIDRKRYTSTKEVLDATLIHQSITGLYETRIDLSQLGGDPKKKRKVSGSETPGTSESATPESTGRTLVTFKDVFVDFTREEWKLLDTAQQIVYRNVMLENYKNLVSLGYQLTKPDVILRLEKGEEP

SEQ ID NO: 2219 - DNA, 6654 bp, Synthetic construct
  source 1..6654: mol_type = other DNA
atgaaccatgatcaagaattcgacccacctaaagtctacccacctgtgcccgccgaaaaaaggaaacccataagggtgctgtcactctttgatggcatcgccactggtctcctggttcttaaggatctgggaattcaggtcgatcggtacattgctagcgaggtttgtgaggatagtattacagtgggtatggtgcgccaccagggaaagatcatgtatgttggtgacgttaggagcgtcacccagaaacatatccaggagtggggaccctttgatttggtgatcggaggtagtccctgcaatgacctttccatcgtgaatccagccaggaaagggctgtatgaagggactggtaggctctttttcgagttttatcgcctgcttcacgacgctagacctaaggaaggtgacgataggcctttcttttggctttttgagaacgtcgtggcaatgggagtctccgacaaaagggacatttctcgctttctggaatctaaccccgttatgatcgatgccaaggaagtttctgccgctcacagggcaaggtacttctggggcaatctgcccggaatgaatcgcccactggccagtaccgtgaatgacaaactggagctgcaggagtgcctggagcacggaagaatcgcaaagttttctaaagtcaggaccattaccactcgcagtaactccataaaacagggtaaggaccagcattttcccgtcttcatgaatgaaaaggaagatattctgtggtgcactgaaatggagagagttttcgggtttcccgtgcactataccgatgtttccaacatgtcccgccttgcaagacaaaggcttttgggccgctcttggtctgtgccagtgatccggcacttgtttgctcccctcaaagagtacttcgcttgcgtcagttccggaaattcaaacgctaactctcggggtccatctttctccagtggtctcgtgccactgtctctccggggctctcacatggaagtcaaggctaaccagcgaaatatagaagacatctgcatctgctgcggaagtctccaggttcacacacagcaccctctgtttgagggagggatctgcgccccatgtaaggacaagttcctggatgccctcttcctgtacgacgatgacgggtaccaatcctactgctccatctgctgctccggagagacgctgctcatctgcggaaaccctgattgcacccgatgctactgcttcgagtgtgtggatagcctggtcggccccgggacctcggggaaggtgcacgccatgagcaactgggtgtgctacctgtgcctgccgtcctcccgaagcgggctgctgcagcgtcggaggaagtggcgcagccagctcaaggccttctacgaccgagagtcggagaatcccctggagatgtttgagacagtgccagtctggcggaggcagcccgttcgcgttctctctctgttcgaagatattaaaaaggaactcacctcccttgggttcctggagagcgggagcgaccccggacagcttaagcacgtggtcgacgtgactgacaccgtccgcaaagacgtggaggaatggggccccttcgatctggtctatggggcaacccctccccttgggcatacatgtgatcggcctccatcctggtacctgttccagtttcacagactcctgcagtatgccaggccaaagccagggagcccaaggccctttttctggatgttcgtcgacaacctggtcctgaacaaagaagatctcgacgttgctagtcgctttctcgaaatggagcccgtgaccattcccgacgtgcatggcggttccctccagaatgcagtcagggtttggagcaatatccctgccatcaggtcaaggcactgggcactggtttcagaggaagagctgtccctccttgcccagaacaagcagtcatccaaactggcagccaagtggccaactaagctggtcaagaactgctttcttcccctcagagaatattttaagtatttcagtactgaactgactagcagtctgggagggccgagctctggcgcacccccaccaagtggagggtctcctgccgggtccccaacatctactgaagaaggcaccagcgaatccgcaacgcccgagtcaggccctggtacctccacagaaccatctgaaggtagtgcgcctggttccccagctggaagccctacttccaccgaagaaggcacgtcaaccgaaccaagtgaaggatctgcccctgggaccagcactgaaccatctgagccaaaaaagaagagaaaggtaatggacaagaagtacagcatcggcctggccatcggcaccaactctgtgggctgggccgtgatcaccgacgagtacaaggtgcccagcaagaaattcaaggtgctgggcaacaccgaccggcacagcatcaagaagaacctgatcggcgccctgctgttcgacagcggagaaacagccgaggccacccggctgaagagaaccgccagaagaagatacaccagacggaagaaccggatctgctatctgcaagagatcttcagcaacgagatggccaaggtggacgacagcttcttccacagactggaagagtccttcctggtggaagaggataagaagcacgagcggcaccccatcttcggcaacatcgtggacgaggtggcctaccacgagaagtaccccaccatctaccacctgagaaagaaactggtggacagcaccgacaaggccgacctgcggctgatctatctggccctggcccacatgatcaagttccggggccacttcctgatcgagggcgacctgaaccccgacaacagcgacgtggacaagctgttcatccagctggtgcagacctacaaccagctgttcgaggaaaaccccatcaacgccagcggcgtggacgccaaggccatcctgtctgccagactgagcaagagcagacggctggaaaatctgatcgcccagctgcccggcgagaagaagaatggcctgttcggcaacctgattgccctgagcctgggcctgacccccaacttcaagagcaacttcgacctggccgaggatgccaaactgcagctgagcaaggacacctacgacgacgacctggacaacctgctggcccagatcggcgaccagtacgccgacctgtttctggccgccaagaacctgtccgacgccatcctgctgagcgacatcctgagagtgaacaccgagatcaccaaggcccccctgagcgcctctatgatcaagagatacgacgagcaccaccaggacctgaccctgctgaaagctctcgtgcggcagcagctgcctgagaagtacaaagagattttcttcgaccagagcaagaacggctacgccggctacatcgatggcggagccagccaggaagagttctacaagttcatcaagcccatcctggaaaagatggacggcaccgaggaactgctcgtgaagctgaacagagaggacctgctgcggaagcagcggaccttcgacaacggcagcatcccccaccagatccacctgggagagctgcacgccattctgcggcggcaggaagatttttacccattcctgaaggacaaccgggaaaagatcgagaagatcctgaccttccgcatcccctactacgtgggccctctggccaggggaaacagcagattcgcctggatgaccagaaagagcgaggaaaccatcaccccctggaacttcgaggaagtggtggacaagggcgccagcgcccagagcttcatcgagcggatgaccaacttcgataagaacctgcccaacgagaaggtgctgcccaagcacagcctgctgtacgagtacttcaccgtgtacaacgagctgaccaaagtgaaatacgtgaccgagggaatgagaaagcccgccttcctgagcggcgagcagaaaaaagccatcgtggacctgctgttcaagaccaaccggaaagtgaccgtgaagcagctgaaagaggactacttcaagaaaatcgagtgcttcgactccgtggaaatctccggcgtggaagatcggttcaacgcctccctgggcacataccacgatctgctgaaaattatcaaggacaaggacttcctggacaatgaggaaaacgaggacattctggaagatatcgtgctgaccctgacactgtttgaggacagagagatgatcgaggaacggctgaaaacctatgcccacctgttcgacgacaaagtgatgaagcagctgaagcggcggagatacaccggctggggcaggctgagccggaagctgatcaacggcatccgggacaagcagtccggcaagacaatcctggatttcctgaagtccgacggcttcgccaacagaaacttcatgcagctgatccacgacgacagcctgacctttaaagaggacatccagaaagcccaggtgtccggccagggcgatagcctgcacgagcacattgccaatctggccggcagccccgccattaagaagggcatcctgcagacagtgaaggtggtggacgagctcgtgaaagtgatgggccggcacaagcccgagaacatcgtgatcgaaatggccagagagaaccagaccacccagaagggacagaagaacagccgcgagagaatgaagcggatcgaagagggcatcaaagagctgggcagccagatcctgaaagaacaccccgtggaaaacacccagctgcagaacgagaagctgtacctgtactacctgcagaatgggcgggatatgtacgtggaccaggaactggacatcaaccggctgtccgactacgatgtggacgctatcgtgcctcagagctttctgaaggacgactccatcgataacaaagtgctgactcggagcgacaagaaccggggcaagagcgacaacgtgccctccgaagaggtcgtgaagaagatgaagaactactggcgccagctgctgaatgccaagctgattacccagaggaagttcgacaatctgaccaaggccgagagaggcggcctgagcgaactggataaggccggcttcatcaagagacagctggtggaaacccggcagatcacaaagcacgtggcacagatcctggactcccggatgaacactaagtacgacgagaacgacaaactgatccgggaagtgaaagtgatcaccctgaagtccaagctggtgtccgatttccggaaggatttccagttttacaaagtgcgcgagatcaacaactaccaccacgcccacgacgcctacctgaacgccgtcgtgggaaccgccctgatcaaaaagtaccctaagctggaaagcgagttcgtgtacggcgactacaaggtgtacgacgtgcggaagatgatcgccaagagcgagcaggaaatcggcaaggctaccgccaagtacttcttctacagcaacatcatgaactttttcaagaccgagattaccctggccaacggcgagatccggaagcggcctctgatcgagacaaacggcgaaacaggcgagatcgtgtgggataagggccgggactttgccaccgtgcggaaagtgctgtctatgccccaagtgaatatcgtgaaaaagaccgaggtgcagacaggcggcttcagcaaagagtctatcctgcccaagaggaacagcgacaagctgatcgccagaaagaaggactgggaccctaagaagtacggcggcttcgacagccccaccgtggcctattctgtgctggtggtggccaaagtggaaaagggcaagtccaagaaactgaagagtgtgaaagagctgctggggatcaccatcatggaaagaagcagcttcgagaagaatcccatcgactttctggaagccaagggctacaaagaagtgaaaaaggacctgatcatcaagctgcctaagtactccctgttcgagctggaaaacggccggaagagaatgctggcctctgccggcgaactgcagaagggaaacgaactggccctgccctccaaatatgtgaacttcctgtacctggccagccactatgagaagctgaagggctcccccgaggataatgagcagaaacagctgtttgtggaacagcacaaacactacctggacgagatcatcgagcagatcagcgagttctccaagagagtgatcctggccgacgctaatctggacaaggtgctgagcgcctacaacaagcacagagacaagcctatcagagagcaggccgagaatatcatccacctgtttaccctgaccaatctgggagcccctgccgccttcaagtactttgacaccaccatcgaccggaagaggtacaccagcaccaaagaggtgctggacgccaccctgatccaccagagcatcaccggcctgtacgagacacggatcgacctgtctcagctgggaggcgacccaaaaaagaagagaaaggtaagcggaagtgagaccccaggtacatccgaatcagcaacgcctgaaagcaccggtcggacactggtgaccttcaaggatgtatttgtggacttcaccagggaggagtggaagctgctggacactgctcagcagatcgtgtacagaaatgtgatgctggagaactataagaacctggtttccttgggttatcagcttactaagccagatgtgatcctccggttggagaagggagaagagccc

SEQ ID NO: 2220 - protein, 2109 aa, Synthetic construct
MPKKKRKVPKKKRKVNHDQEFDPPKVYPPVPAEKRKPIRVLSLFDGIATGLLVLKDLGIQVDRYIASEVCEDSITVGMVRHQGKIMYVGDVRSVTQKHIQEWGPFDLVIGGSPCNDLSIVNPARKGLYEGTGRLFFEFYRLLHDARPKEGDDRPFFWLFENVVAMGVSDKRDISRFLESNPVMIDAKEVSAAHRARYFWGNLPGMNRPLASTVNDKLELQECLEHGRIAKFSKVRTITTRSNSIKQGKDQHFPVFMNEKEDILWCTEMERVFGFPVHYTDVSNMSRLARQRLLGRSWSVPVIRHLFAPLKEYFACVSSGNSNANSRGPSFSSGLVPLSLRGSHNPLEMFETVPVWRRQPVRVLSLFEDIKKELTSLGFLESGSDPGQLKHVVDVTDTVRKDVEEWGPFDLVYGATPPLGHTCDRPPSWYLFQFHRLLQYARPKPGSPRPFFWMFVDNLVLNKEDLDVASRFLEMEPVTIPDVHGGSLQNAVRVWSNIPAIRSRHWALVSEEELSLLAQNKQSSKLAAKWPTKLVKNCFLPLREYFKYFSTELTSSLGGPSSGAPPPSGGSPAGSPTSTEEGTSESATPESGPGTSTEPSEGSAPGSPAGSPTSTEEGTSTEPSEGSAPGTSTEPSEMDKKYSIGLAIGTNSVGWAVITDEYKVPSKKFKVLGNTDRHSIKKNLIGALLFDSGETAEATRLKRTARRRYTRRKNRICYLQEIFSNEMAKVDDSFFHRLEESFLVEEDKKHERHPIFGNIVDEVAYHEKYPTIYHLRKKLVDSTDKADLRLIYLALAHMIKFRGHFLIEGDLNPDNSDVDKLFIQLVQTYNQLFEENPINASGVDAKAILSARLSKSRRLENLIAQLPGEKKNGLFGNLIALSLGLTPNFKSNFDLAEDAKLQLSKDTYDDDLDNLLAQIGDQYADLFLAAKNLSDAILLSDILRVNTEITKAPLSASMIKRYDEHHQDLTLLKALVRQQLPEKYKEIFFDQSKNGYAGYIDGGASQEEFYKFIKPILEKMDGTEELLVKLNREDLLRKQRTFDNGSIPHQIHLGELHAILRRQEDFYPFLKDNREKIEKILTFRIPYYVGPLARGNSRFAWMTRKSEETITPWNFEEVVDKGASAQSFIERMTNFDKNLPNEKVLPKHSLLYEYFTVYNELTKVKYVTEGMRKPAFLSGEQKKAIVDLLFKTNRKVTVKQLKEDYFKKIECFDSVEISGVEDRFNASLGTYHDLLKIIKDKDFLDNEENEDILEDIVLTLTLFEDREMIEERLKTYAHLFDDKVMKQLKRRRYTGWGRLSRKLINGIRDKQSGKTILDFLKSDGFANRNFMQLIHDDSLTFKEDIQKAQVSGQGDSLHEHIANLAGSPAIKKGILQTVKVVDELVKVMGRHKPENIVIEMARENQTTQKGQKNSRERMKRIEEGIKELGSQILKEHPVENTQLQNEKLYLYYLQNGRDMYVDQELDINRLSDYDVDAIVPQSFLKDDSIDNKVLTRSDKNRGKSDNVPSEEVVKKMKNYWRQLLNAKLITQRKFDNLTKAERGGLSELDKAGFIKRQLVETRQITKHVAQILDSRMNTKYDENDKLIREVKVITLKSKLVSDFRKDFQFYKVREINNYHHAHDAYLNAVVGTALIKKYPKLESEFVYGDYKVYDVRKMIAKSEQEIGKATAKYFFYSNIMNFFKTEITLANGEIRKRPLIETNGETGEIVWDKGRDFATVRKVLSMPQVNIVKKTEVQTGGFSKESILPKRNSDKLIARKKDWDPKKYGGFDSPTVAYSVLVVAKVEKGKSKKLKSVKELLGITIMERSSFEKNPIDFLEAKGYKEVKKDLIIKLPKYSLFELENGRKRMLASAGELQKGNELALPSKYVNFLYLASHYEKLKGSPEDNEQKQLFVEQHKHYLDEIIEQISEFSKRVILADANLDKVLSAYNKHRDKPIREQAENIIHLFTLTNLGAPAAFKYFDTTIDRKRYTSTKEVLDATLIHQSITGLYETRIDLSQLGGDSGSETPGTSESATPESTGRTLVTFKDVFVDFTREEWKLLDTAQQIVYRNVMLENYKNLVSLGYQLTKPDVILRLEKGEEPSADYKDDDDKAPKKKRKVPKKKRKV

SEQ ID NO: 2221 - DNA, 6327 bp, Synthetic construct
  source 1..6327: mol_type = other DNA
atgccaaaaaagaagagaaaggtaccgaagaaaaaaagaaaggtcaaccacgaccaggaattcgaccctccaaaggtttacccacctgtcccagctgagaagaggaagcccatccgggtgctgtctctctttgatggaatcgctacagggctcctggtgctgaaggacttgggcattcaggtggaccgctacattgcctcggaggtgtgtgaggactccatcacggtgggcatggtgcggcaccaggggaagatcatgtacgtcggggacgtccgcagcgtcacacagaagcatatccaggagtggggcccattcgatctggtgattgggggcagtccctgcaatgacctctccatcgtcaaccctgctcgcaagggcctctacgagggcactggccggctcttctttgagttctaccgcctcctgcatgatgcgcggcccaaggagggagatgatcgccccttcttctggctctttgagaatgtggtggccatgggcgttagtgacaagagggacatctcgcgatttctcgagtccaaccctgtgatgattgatgccaaagaagtgtcagctgcacacagggcccgctacttctggggtaaccttcccggtatgaacaggccgttggcatccactgtgaatgataagctggagctgcaggagtgtctggagcatggcaggatagccaagttcagcaaagtgaggaccattactacgaggtcaaactccataaagcagggcaaagaccagcattttcctgtcttcatgaatgagaaagaggacatcttatggtgcactgaaatggaaagggtatttggtttcccagtccactatactgacgtctccaacatgagccgcttggcgaggcagagactgctgggccggtcatggagcgtgccagtcatccgccacctcttcgctccgctgaaggagtattttgcgtgtgtgtctagcggcaatagtaacgctaacagccgcgggccgagcttcagcagcggcctggtgccgttaagcttgcgcggcagccataatccccttgagatgttcgaaaccgtgcctgtgtggaggagacagccagtccgggtgctgtccctttttgaagacatcaagaaagagctgacgagtttgggctttttggaaagtggttctgacccgggacaactgaagcatgtggttgatgtcacagacacagtgaggaaggatgtggaggagtggggacccttcgatcttgtgtacggcgccacacctcccctgggccacacctgtgaccgtcctcccagctggtacctgttccagttccaccggctcctgcagtacgcacggcccaagccaggcagccccaggcccttcttctggatgttcgtggacaatctggtgctgaacaaggaagacctggacgtcgcatctcgcttcctggagatggagccagtcaccatcccagatgtccacggcggatccttgcagaatgctgtccgcgtgtggagcaacatcccagccataaggagcaggcactgggctctggtttcggaagaagaattgtccctgctggcccagaacaagcagagctcgaagctcgcggccaagtggcccaccaagctggtgaagaactgctttctccccctaagagaatatttcaagtatttttcaacagaactcacttcctctttaggagggccgagctctggcgcacccccaccaagtggagggtctcctgccgggtccccaacatctactgaagaaggcaccagcgaatccgcaacgcccgagtcaggccctggtacctccacagaaccatctgaaggtagtgcgcctggttccccagctggaagccctacttccaccgaagaaggcacgtcaaccgaaccaagtgaaggatctgcccctgggaccagcactgaaccatctgagatggacaagaagtacagcatcggcctggccatcggcaccaactctgtgggctgggccgtgatcaccgacgagtacaaggtgcccagcaagaaattcaaggtgctgggcaacaccgaccggcacagcatcaagaagaacctgatcggcgccctgctgttcgacagcggagaaacagccgaggccacccggctgaagagaaccgccagaagaagatacaccagacggaagaaccggatctgctatctgcaagagatcttcagcaacgagatggccaaggtggacgacagcttcttccacagactggaagagtccttcctggtggaagaggataagaagcacgagcggcaccccatcttcggcaacatcgtggacgaggtggcctaccacgagaagtaccccaccatctaccacctgagaaagaaactggtggacagcaccgacaaggccgacctgcggctgatctatctggccctggcccacatgatcaagttccggggccacttcctgatcgagggcgacctgaaccccgacaacagcgacgtggacaagctgttcatccagctggtgcagacctacaaccagctgttcgaggaaaaccccatcaacgccagcggcgtggacgccaaggccatcctgtctgccagactgagcaagagcagacggctggaaaatctgatcgcccagctgcccggcgagaagaagaatggcctgttcggcaacctgattgccctgagcctgggcctgacccccaacttcaagagcaacttcgacctggccgaggatgccaaactgcagctgagcaaggacacctacgacgacgacctggacaacctgctggcccagatcggcgaccagtacgccgacctgtttctggccgccaagaacctgtccgacgccatcctgctgagcgacatcctgagagtgaacaccgagatcaccaaggcccccctgagcgcctctatgatcaagagatacgacgagcaccaccaggacctgaccctgctgaaagctctcgtgcggcagcagctgcctgagaagtacaaagagattttcttcgaccagagcaagaacggctacgccggctacatcgatggcggagccagccaggaagagttctacaagttcatcaagcccatcctggaaaagatggacggcaccgaggaactgctcgtgaagctgaacagagaggacctgctgcggaagcagcggaccttcgacaacggcagcatcccccaccagatccacctgggagagctgcacgccattctgcggcggcaggaagatttttacccattcctgaaggacaaccgggaaaagatcgagaagatcctgaccttccgcatcccctactacgtgggccctctggccaggggaaacagcagattcgcctggatgaccagaaagagcgaggaaaccatcaccccctggaacttcgaggaagtggtggacaagggcgccagcgcccagagcttcatcgagcggatgaccaacttcgataagaacctgcccaacgagaaggtgctgcccaagcacagcctgctgtacgagtacttcaccgtgtacaacgagctgaccaaagtgaaatacgtgaccgagggaatgagaaagcccgccttcctgagcggcgagcagaaaaaagccatcgtggacctgctgttcaagaccaaccggaaagtgaccgtgaagcagctgaaagaggactacttcaagaaaatcgagtgcttcgactccgtggaaatctccggcgtggaagatcggttcaacgcctccctgggcacataccacgatctgctgaaaattatcaaggacaaggacttcctggacaatgaggaaaacgaggacattctggaagatatcgtgctgaccctgacactgtttgaggacagagagatgatcgaggaacggctgaaaacctatgcccacctgttcgacgacaaagtgatgaagcagctgaagcggcggagatacaccggctggggcaggctgagccggaagctgatcaacggcatccgggacaagcagtccggcaagacaatcctggatttcctgaagtccgacggcttcgccaacagaaacttcatgcagctgatccacgacgacagcctgacctttaaagaggacatccagaaagcccaggtgtccggccagggcgatagcctgcacgagcacattgccaatctggccggcagccccgccattaagaagggcatcctgcagacagtgaaggtggtggacgagctcgtgaaagtgatgggccggcacaagcccgagaacatcgtgatcgaaatggccagagagaaccagaccacccagaagggacagaagaacagccgcgagagaatgaagcggatcgaagagggcatcaaagagctgggcagccagatcctgaaagaacaccccgtggaaaacacccagctgcagaacgagaagctgtacctgtactacctgcagaatgggcgggatatgtacgtggaccaggaactggacatcaaccggctgtccgactacgatgtggacgctatcgtgcctcagagctttctgaaggacgactccatcgataacaaagtgctgactcggagcgacaagaaccggggcaagagcgacaacgtgccctccgaagaggtcgtgaagaagatgaagaactactggcgccagctgctgaatgccaagctgattacccagaggaagttcgacaatctgaccaaggccgagagaggcggcctgagcgaactggataaggccggcttcatcaagagacagctggtggaaacccggcagatcacaaagcacgtggcacagatcctggactcccggatgaacactaagtacgacgagaacgacaaactgatccgggaagtgaaagtgatcaccctgaagtccaagctggtgtccgatttccggaaggatttccagttttacaaagtgcgcgagatcaacaactaccaccacgcccacgacgcctacctgaacgccgtcgtgggaaccgccctgatcaaaaagtaccctaagctggaaagcgagttcgtgtacggcgactacaaggtgtacgacgtgcggaagatgatcgccaagagcgagcaggaaatcggcaaggctaccgccaagtacttcttctacagcaacatcatgaactttttcaagaccgagattaccctggccaacggcgagatccggaagcggcctctgatcgagacaaacggcgaaacaggcgagatcgtgtgggataagggccgggactttgccaccgtgcggaaagtgctgtctatgccccaagtgaatatcgtgaaaaagaccgaggtgcagacaggcggcttcagcaaagagtctatcctgcccaagaggaacagcgacaagctgatcgccagaaagaaggactgggaccctaagaagtacggcggcttcgacagccccaccgtggcctattctgtgctggtggtggccaaagtggaaaagggcaagtccaagaaactgaagagtgtgaaagagctgctggggatcaccatcatggaaagaagcagcttcgagaagaatcccatcgactttctggaagccaagggctacaaagaagtgaaaaaggacctgatcatcaagctgcctaagtactccctgttcgagctggaaaacggccggaagagaatgctggcctctgccggcgaactgcagaagggaaacgaactggccctgccctccaaatatgtgaacttcctgtacctggccagccactatgagaagctgaagggctcccccgaggataatgagcagaaacagctgtttgtggaacagcacaaacactacctggacgagatcatcgagcagatcagcgagttctccaagagagtgatcctggccgacgctaatctggacaaggtgctgagcgcctacaacaagcacagagacaagcctatcagagagcaggccgagaatatcatccacctgtttaccctgaccaatctgggagcccctgccgccttcaagtactttgacaccaccatcgaccggaagaggtacaccagcaccaaagaggtgctggacgccaccctgatccaccagagcatcaccggcctgtacgagacacggatcgacctgtctcagctgggaggcgacagcggaagtgagaccccaggtacatccgaatcagcaacgcctgaaagcaccggtcggacactggtgaccttcaaggatgtatttgtggacttcaccagggaggagtggaagctgctggacactgctcagcagatcgtgtacagaaatgtgatgctggagaactataagaacctggtttccttgggttatcagcttactaagccagatgtgatcctccggttggagaagggagaagagcccagcgctgattacaaagatgatgacgataaagccccaaaaaagaagagaaaggtaccgaagaaaaaaagaaaggtc

SEQ ID NO: 2222 - protein, 2111 aa, Synthetic construct
MPKKKRKVPKKKRKVNHDQEFDPPKVYPPVPAEKRKPIRVLSLFDGIATGLLVLKDLGIQVDRYIASEVCEDSITVGMVRHQGKIMYVGDVRSVTQKHIQEWGPFDLVIGGSPCNDLSIVNPARKGLYEGTGRLFFEFYRLLHDARPKEGDDRPFFWLFENVVAMGVSDKRDISRFLESNPVMIDAKEVSAAHRARYFWGNLPGMNRPLASTVNDKLELQECLEHGRIAKFSKVRTITTRSNSIKQGKDQHFPVFMNEKEDILWCTEMERVFGFPVHYTDVSNMSRLARQRLLGRSWSVPVIRHLFAPLKEYFACVSSGNSNANSRGPSFSSGLVPLSLRGSHMGPMEIYKTVSAWKRQPVRVLSLFRNIDKVLKSLGFLESGSGSGGGTLKYVEDVTNVVRRDVEKWGPFDLVYGSTQPLGSSCDRCPGWYMFQFHRILQYALPRQESQRPFFWIFMDNLLLTEDDQETTTRFLQTEAVTLQDVRGRDYQNAMRVWSNIPGLKSKHAPLTPKEEEYLQAQVRSRSKLDAPKVDLLVKNCLLPLREYFKYFSQNSLPLGGPSSGAPPPSGGSPAGSPTSTEEGTSESATPESGPGTSTEPSEGSAPGSPAGSPTSTEEGTSTEPSEGSAPGTSTEPSEMDKKYSIGLAIGTNSVGWAVITDEYKVPSKKFKVLGNTDRHSIKKNLIGALLFDSGETAEATRLKRTARRRYTRRKNRICYLQEIFSNEMAKVDDSFFHRLEESFLVEEDKKHERHPIFGNIVDEVAYHEKYPTIYHLRKKLVDSTDKADLRLIYLALAHMIKFRGHFLIEGDLNPDNSDVDKLFIQLVQTYNQLFEENPINASGVDAKAILSARLSKSRRLENLIAQLPGEKKNGLFGNLIALSLGLTPNFKSNFDLAEDAKLQLSKDTYDDDLDNLLAQIGDQYADLFLAAKNLSDAILLSDILRVNTEITKAPLSASMIKRYDEHHQDLTLLKALVRQQLPEKYKEIFFDQSKNGYAGYIDGGASQEEFYKFIKPILEKMDGTEELLVKLNREDLLRKQRTFDNGSIPHQIHLGELHAILRRQEDFYPFLKDNREKIEKILTFRIPYYVGPLARGNSRFAWMTRKSEETITPWNFEEVVDKGASAQSFIERMTNFDKNLPNEKVLPKHSLLYEYFTVYNELTKVKYVTEGMRKPAFLSGEQKKAIVDLLFKTNRKVTVKQLKEDYFKKIECFDSVEISGVEDRFNASLGTYHDLLKIIKDKDFLDNEENEDILEDIVLTLTLFEDREMIEERLKTYAHLFDDKVMKQLKRRRYTGWGRLSRKLINGIRDKQSGKTILDFLKSDGFANRNFMQLIHDDSLTFKEDIQKAQVSGQGDSLHEHIANLAGSPAIKKGILQTVKVVDELVKVMGRHKPENIVIEMARENQTTQKGQKNSRERMKRIEEGIKELGSQILKEHPVENTQLQNEKLYLYYLQNGRDMYVDQELDINRLSDYDVDAIVPQSFLKDDSIDNKVLTRSDKNRGKSDNVPSEEVVKKMKNYWRQLLNAKLITQRKFDNLTKAERGGLSELDKAGFIKRQLVETRQITKHVAQILDSRMNTKYDENDKLIREVKVITLKSKLVSDFRKDFQFYKVREINNYHHAHDAYLNAVVGTALIKKYPKLESEFVYGDYKVYDVRKMIAKSEQEIGKATAKYFFYSNIMNFFKTEITLANGEIRKRPLIETNGETGEIVWDKGRDFATVRKVLSMPQVNIVKKTEVQTGGFSKESILPKRNSDKLIARKKDWDPKKYGGFDSPTVAYSVLVVAKVEKGKSKKLKSVKELLGITIMERSSFEKNPIDFLEAKGYKEVKKDLIIKLPKYSLFELENGRKRMLASAGELQKGNELALPSKYVNFLYLASHYEKLKGSPEDNEQKQLFVEQHKHYLDEIIEQISEFSKRVILADANLDKVLSAYNKHRDKPIREQAENIIHLFTLTNLGAPAAFKYFDTTIDRKRYTSTKEVLDATLIHQSITGLYETRIDLSQLGGDSGSETPGTSESATPESTGRTLVTFKDVFVDFTREEWKLLDTAQQIVYRNVMLENYKNLVSLGYQLTKPDVILRLEKGEEPSADYKDDDDKAPKKKRKVPKKKRKV

SEQ ID NO: 2223 - DNA, 6336 bp, Synthetic construct
  source 1..6336: mol_type = other DNA
atgccaaaaaagaagagaaaggtaccgaagaaaaaaagaaaggtatacaaccatgaccaggaattcgaccccccaaaggtttacccacctgtgccagctgagaagaggaagcccatccgcgtgctgtctctctttgatgggattgctacagggctcctggtgctgaaggacctgggcatccaagtggaccgctacattgcctccgaggtgtgtgaggactccatcacggtgggcatggtgcggcaccagggaaagatcatgtacgtcggggacgtccgcagcgtcacacagaagcatatccaggagtggggcccattcgacctggtgattggaggcagtccctgcaatgacctctccattgtcaaccctgcccgcaagggactttatgagggtactggccgcctcttctttgagttctaccgcctcctgcatgatgcgcggcccaaggagggagatgatcgccccttcttctggctctttgagaatgtggtggccatgggcgttagtgacaagagggacatctcgcgatttcttgagtctaaccccgtgatgattgacgccaaagaagtgtctgctgcacacagggcccgttacttctggggtaaccttcctggcatgaacaggcctttggcatccactgtgaatgataagctggagctgcaagagtgtctggagcacggcagaatagccaagttcagcaaagtgaggaccattaccaccaggtcaaactctataaagcagggcaaagaccagcatttccccgtcttcatgaacgagaaggaggacatcctgtggtgcactgaaatggaaagggtgtttggcttccccgtccactacacagacgtctccaacatgagccgcttggcgaggcagagactgctgggccgatcgtggagcgtgccggtcatccgccacctcttcgctccgctgaaggaatattttgcttgtgtgtctagcggcaatagtaacgctaacagccgcgggccgagcttcagcagcggcctggtgccgttaagcttgcgcggcagccatatgggccctatggagatatacaagacagtgtctgcatggaagagacagccagtgcgggtactgagcctcttcagaaacatcgacaaggtactaaagagtttgggcttcttggaaagcggttctggttctgggggaggaacgctgaagtacgtggaagatgtcacaaatgtcgtgaggagagacgtggagaaatggggcccctttgacctggtgtacggctcgacgcagcccctaggcagctcttgtgatcgctgtcccggctggtacatgttccagttccaccggatcctgcagtatgcgctgcctcgccaggagagtcagcggcccttcttctggatattcatggacaatctgctgctgactgaggatgaccaagagacaactacccgcttccttcagacagaggctgtgaccctccaggatgtccgtggcagagactaccagaatgctatgcgggtgtggagcaacattccagggctgaagagcaagcatgcgcccctgaccccaaaggaagaagagtatctgcaagcccaagtcagaagcaggagcaagctggacgccccgaaagttgacctcctggtgaagaactgccttctcccgctgagagagtacttcaagtatttttctcaaaactcacttcctcttggagggccgagctctggcgcacccccaccaagtggagggtctcctgccgggtccccaacatctactgaagaaggcaccagcgaatccgcaacgcccgagtcaggccctggtacctccacagaaccatctgaaggtagtgcgcctggttccccagctggaagccctacttccaccgaagaaggcacgtcaaccgaaccaagtgaaggatctgcccctgggaccagcactgaaccatctgagatggacaagaagtacagcatcggcctggccatcggcaccaactctgtgggctgggccgtgatcaccgacgagtacaaggtgcccagcaagaaattcaaggtgctgggcaacaccgaccggcacagcatcaagaagaacctgatcggcgccctgctgttcgacagcggagaaacagccgaggccacccggctgaagagaaccgccagaagaagatacaccagacggaagaaccggatctgctatctgcaagagatcttcagcaacgagatggccaaggtggacgacagcttcttccacagactggaagagtccttcctggtggaagaggataagaagcacgagcggcaccccatcttcggcaacatcgtggacgaggtggcctaccacgagaagtaccccaccatctaccacctgagaaagaaactggtggacagcaccgacaaggccgacctgcggctgatctatctggccctggcccacatgatcaagttccggggccacttcctgatcgagggcgacctgaaccccgacaacagcgacgtggacaagctgttcatccagctggtgcagacctacaaccagctgttcgaggaaaaccccatcaacgccagcggcgtggacgccaaggccatcctgtctgccagactgagcaagagcagacggctggaaaatctgatcgcccagctgcccggcgagaagaagaatggcctgttcggcaacctgattgccctgagcctgggcctgacccccaacttcaagagcaacttcgacctggccgaggatgccaaactgcagctgagcaaggacacctacgacgacgacctggacaacctgctggcccagatcggcgaccagtacgccgacctgtttctggccgccaagaacctgtccgacgccatcctgctgagcgacatcctgagagtgaacaccgagatcaccaaggcccccctgagcgcctctatgatcaagagatacgacgagcaccaccaggacctgaccctgctgaaagctctcgtgcggcagcagctgcctgagaagtacaaagagattttcttcgaccagagcaagaacggctacgccggctacatcgatggcggagccagccaggaagagttctacaagttcatcaagcccatcctggaaaagatggacggcaccgaggaactgctcgtgaagctgaacagagaggacctgctgcggaagcagcggaccttcgacaacggcagcatcccccaccagatccacctgggagagctgcacgccattctgcggcggcaggaagatttttacccattcctgaaggacaaccgggaaaagatcgagaagatcctgaccttccgcatcccctactacgtgggccctctggccaggggaaacagcagattcgcctggatgaccagaaagagcgaggaaaccatcaccccctggaacttcgaggaagtggtggacaagggcgccagcgcccagagcttcatcgagcggatgaccaacttcgataagaacctgcccaacgagaaggtgctgcccaagcacagcctgctgtacgagtacttcaccgtgtacaacgagctgaccaaagtgaaatacgtgaccgagggaatgagaaagcccgccttcctgagcggcgagcagaaaaaagccatcgtggacctgctgttcaagaccaaccggaaagtgaccgtgaagcagctgaaagaggactacttcaagaaaatcgagtgcttcgactccgtggaaatctccggcgtggaagatcggttcaacgcctccctgggcacataccacgatctgctgaaaattatcaaggacaaggacttcctggacaatgaggaaaacgaggacattctggaagatatcgtgctgaccctgacactgtttgaggacagagagatgatcgaggaacggctgaaaacctatgcccacctgttcgacgacaaagtgatgaagcagctgaagcggcggagatacaccggctggggcaggctgagccggaagctgatcaacggcatccgggacaagcagtccggcaagacaatcctggatttcctgaagtccgacggcttcgccaacagaaacttcatgcagctgatccacgacgacagcctgacctttaaagaggacatccagaaagcccaggtgtccggccagggcgatagcctgcacgagcacattgccaatctggccggcagccccgccattaagaagggcatcctgcagacagtgaaggtggtggacgagctcgtgaaagtgatgggccggcacaagcccgagaacatcgtgatcgaaatggccagagagaaccagaccacccagaagggacagaagaacagccgcgagagaatgaagcggatcgaagagggcatcaaagagctgggcagccagatcctgaaagaacaccccgtggaaaacacccagctgcagaacgagaagctgtacctgtactacctgcagaatgggcgggatatgtacgtggaccaggaactggacatcaaccggctgtccgactacgatgtggacgctatcgtgcctcagagctttctgaaggacgactccatcgataacaaagtgctgactcggagcgacaagaaccggggcaagagcgacaacgtgccctccgaagaggtcgtgaagaagatgaagaactactggcgccagctgctgaatgccaagctgattacccagaggaagttcgacaatctgaccaaggccgagagaggcggcctgagcgaactggataaggccggcttcatcaagagacagctggtggaaacccggcagatcacaaagcacgtggcacagatcctggactcccggatgaacactaagtacgacgagaacgacaaactgatccgggaagtgaaagtgatcaccctgaagtccaagctggtgtccgatttccggaaggatttccagttttacaaagtgcgcgagatcaacaactaccaccacgcccacgacgcctacctgaacgccgtcgtgggaaccgccctgatcaaaaagtaccctaagctggaaagcgagttcgtgtacggcgactacaaggtgtacgacgtgcggaagatgatcgccaagagcgagcaggaaatcggcaaggctaccgccaagtacttcttctacagcaacatcatgaactttttcaagaccgagattaccctggccaacggcgagatccggaagcggcctctgatcgagacaaacggcgaaacaggcgagatcgtgtgggataagggccgggactttgccaccgtgcggaaagtgctgtctatgccccaagtgaatatcgtgaaaaagaccgaggtgcagacaggcggcttcagcaaagagtctatcctgcccaagaggaacagcgacaagctgatcgccagaaagaaggactgggaccctaagaagtacggcggcttcgacagccccaccgtggcctattctgtgctggtggtggccaaagtggaaaagggcaagtccaagaaactgaagagtgtgaaagagctgctggggatcaccatcatggaaagaagcagcttcgagaagaatcccatcgactttctggaagccaagggctacaaagaagtgaaaaaggacctgatcatcaagctgcctaagtactccctgttcgagctggaaaacggccggaagagaatgctggcctctgccggcgaactgcagaagggaaacgaactggccctgccctccaaatatgtgaacttcctgtacctggccagccactatgagaagctgaagggctcccccgaggataatgagcagaaacagctgtttgtggaacagcacaaacactacctggacgagatcatcgagcagatcagcgagttctccaagagagtgatcctggccgacgctaatctggacaaggtgctgagcgcctacaacaagcacagagacaagcctatcagagagcaggccgagaatatcatccacctgtttaccctgaccaatctgggagcccctgccgccttcaagtactttgacaccaccatcgaccggaagaggtacaccagcaccaaagaggtgctggacgccaccctgatccaccagagcatcaccggcctgtacgagacacggatcgacctgtctcagctgggaggcgacagcggaagtgagaccccaggtacatccgaatcagcaacgcctgaaagcaccggtcggacactggtgaccttcaaggatgtatttgtggacttcaccagggaggagtggaagctgctggacactgctcagcagatcgtgtacagaaatgtgatgctggagaactataagaacctggtttccttgggttatcagcttactaagccagatgtgatcctccggttggagaagggagaagagcccagcgctgattacaaagatgatgacgataaagccccaaaaaagaagagaaaggtaccgaagaaaaaaagaaaggtc

SEQ ID NO: 2224 - protein, 2149 aa, Synthetic construct
MPKKKRKVPKKKRKVNHDQEFDPPKVYPPVPAEKRKPIRVLSLFDGIATGLLVLKDLGIQVDRYIASEVCEDSITVGMVRHQGKIMYVGDVRSVTQKHIQEWGPFDLVIGGSPCNDLSIVNPARKGLYEGTGRLFFEFYRLLHDARPKEGDDRPFFWLFENVVAMGVSDKRDISRFLESNPVMIDAKEVSAAHRARYFWGNLPGMNRPLASTVNDKLELQECLEHGRIAKFSKVRTITTRSNSIKQGKDQHFPVFMNEKEDILWCTEMERVFGFPVHYTDVSNMSRLARQRLLGRSWSVPVIRHLFAPLKEYFACVSSGNSNANSRGPSFSSGLVPLSLRGSHMGPMEIYKTVSAWKRQPVRVLSLFRNIDKVLKSLGFLESGSGSGGGTLKYVEDVTNVVRRDVEKWGPFDLVYGSTQPLGSSCDRCPGWYMFQFHRILQYALPRQESQRPFFWIFMDNLLLTEDDQETTTRFLQTEAVTLQDVRGRDYQNAMRVWSNIPGLKSKHAPLTPKEEEYLQAQVRSRSKLDAPKVDLLVKNCLLPLREYFKYFSQNSLPLGGPSSGAPPPSGGSPAGSPTSTEEGTSESATPESGPGTSTEPSEGSAPGSPAGSPTSTEEGTSTEPSEGSAPGTSTEPSEMDKKYSIGLAIGTNSVGWAVITDEYKVPSKKFKVLGNTDRHSIKKNLIGALLFDSGETAEATRLKRTARRRYTRRKNRICYLQEIFSNEMAKVDDSFFHRLEESFLVEEDKKHERHPIFGNIVDEVAYHEKYPTIYHLRKKLVDSTDKADLRLIYLALAHMIKFRGHFLIEGDLNPDNSDVDKLFIQLVQTYNQLFEENPINASGVDAKAILSARLSKSRRLENLIAQLPGEKKNGLFGNLIALSLGLTPNFKSNFDLAEDAKLQLSKDTYDDDLDNLLAQIGDQYADLFLAAKNLSDAILLSDILRVNTEITKAPLSASMIKRYDEHHQDLTLLKALVRQQLPEKYKEIFFDQSKNGYAGYIDGGASQEEFYKFIKPILEKMDGTEELLVKLNREDLLRKQRTFDNGSIPHQIHLGELHAILRRQEDFYPFLKDNREKIEKILTFRIPYYVGPLARGNSRFAWMTRKSEETITPWNFEEVVDKGASAQSFIERMTNFDKNLPNEKVLPKHSLLYEYFTVYNELTKVKYVTEGMRKPAFLSGEQKKAIVDLLFKTNRKVTVKQLKEDYFKKIECFDSVEISGVEDRFNASLGTYHDLLKIIKDKDFLDNEENEDILEDIVLTLTLFEDREMIEERLKTYAHLFDDKVMKQLKRRRYTGWGRLSRKLINGIRDKQSGKTILDFLKSDGFANRNFMQLIHDDSLTFKEDIQKAQVSGQGDSLHEHIANLAGSPAIKKGILQTVKVVDELVKVMGRHKPENIVIEMARENQTTQKGQKNSRERMKRIEEGIKELGSQILKEHPVENTQLQNEKLYLYYLQNGRDMYVDQELDINRLSDYDVDAIVPQSFLKDDSIDNKVLTRSDKNRGKSDNVPSEEVVKKMKNYWRQLLNAKLITQRKFDNLTKAERGGLSELDKAGFIKRQLVETRQITKHVAQILDSRMNTKYDENDKLIREVKVITLKSKLVSDFRKDFQFYKVREINNYHHAHDAYLNAVVGTALIKKYPKLESEFVYGDYKVYDVRKMIAKSEQEIGKATAKYFFYSNIMNFFKTEITLANGEIRKRPLIETNGETGEIVWDKGRDFATVRKVLSMPQVNIVKKTEVQTGGFSKESILPKRNSDKLIARKKDWDPKKYGGFDSPTVAYSVLVVAKVEKGKSKKLKSVKELLGITIMERSSFEKNPIDFLEAKGYKEVKKDLIIKLPKYSLFELENGRKRMLASAGELQKGNELALPSKYVNFLYLASHYEKLKGSPEDNEQKQLFVEQHKHYLDEIIEQISEFSKRVILADANLDKVLSAYNKHRDKPIREQAENIIHLFTLTNLGAPAAFKYFDTTIDRKRYTSTKEVLDATLIHQSITGLYETRIDLSQLGGDSGSETPGTSESATPESTGMNNSQGRVTFEDVTVNFTQGEWQRLNPEQRNLYRDVMLENYSNLVSVGQGETTKPDVILRLEQGKEPWLEEEEVLGSGRAEKNGDIGGQIWKPKDVKESLSADYKDDDDKAPKKKRKVPKKKRKV

SEQ ID NO: 2225 - DNA, 6450 bp, Synthetic construct
  source 1..6450: mol_type = other DNA
atgccaaaaaagaagagaaaggtaccgaagaaaaaaagaaaggtatacaaccatgaccaggaattcgaccccccaaaggtttacccacctgtgccagctgagaagaggaagcccatccgcgtgctgtctctctttgatgggattgctacagggctcctggtgctgaaggacctgggcatccaagtggaccgctacattgcctccgaggtgtgtgaggactccatcacggtgggcatggtgcggcaccagggaaagatcatgtacgtcggggacgtccgcagcgtcacacagaagcatatccaggagtggggcccattcgacctggtgattggaggcagtccctgcaatgacctctccattgtcaaccctgcccgcaagggactttatgagggtactggccgcctcttctttgagttctaccgcctcctgcatgatgcgcggcccaaggagggagatgatcgccccttcttctggctctttgagaatgtggtggccatgggcgttagtgacaagagggacatctcgcgatttcttgagtctaaccccgtgatgattgacgccaaagaagtgtctgctgcacacagggcccgttacttctggggtaaccttcctggcatgaacaggcctttggcatccactgtgaatgataagctggagctgcaagagtgtctggagcacggcagaatagccaagttcagcaaagtgaggaccattaccaccaggtcaaactctataaagcagggcaaagaccagcatttccccgtcttcatgaacgagaaggaggacatcctgtggtgcactgaaatggaaagggtgtttggcttccccgtccactacacagacgtctccaacatgagccgcttggcgaggcagagactgctgggccgatcgtggagcgtgccggtcatccgccacctcttcgctccgctgaaggaatattttgcttgtgtgtctagcggcaatagtaacgctaacagccgcgggccgagcttcagcagcggcctggtgccgttaagcttgcgcggcagccatatgggccctatggagatatacaagacagtgtctgcatggaagagacagccagtgcgggtactgagcctcttcagaaacatcgacaaggtactaaagagtttgggcttcttggaaagcggttctggttctgggggaggaacgctgaagtacgtggaagatgtcacaaatgtcgtgaggagagacgtggagaaatggggcccctttgacctggtgtacggctcgacgcagcccctaggcagctcttgtgatcgctgtcccggctggtacatgttccagttccaccggatcctgcagtatgcgctgcctcgccaggagagtcagcggcccttcttctggatattcatggacaatctgctgctgactgaggatgaccaagagacaactacccgcttccttcagacagaggctgtgaccctccaggatgtccgtggcagagactaccagaatgctatgcgggtgtggagcaacattccagggctgaagagcaagcatgcgcccctgaccccaaaggaagaagagtatctgcaagcccaagtcagaagcaggagcaagctggacgccccgaaagttgacctcctggtgaagaactgccttctcccgctgagagagtacttcaagtatttttctcaaaactcacttcctcttggagggccgagctctggcgcacccccaccaagtggagggtctcctgccgggtccccaacatctactgaagaaggcaccagcgaatccgcaacgcccgagtcaggccctggtacctccacagaaccatctgaaggtagtgcgcctggttccccagctggaagccctacttccaccgaagaaggcacgtcaaccgaaccaagtgaaggatctgcccctgggaccagcactgaaccatctgagatggacaagaagtacagcatcggcctggccatcggcaccaactctgtgggctgggccgtgatcaccgacgagtacaaggtgcccagcaagaaattcaaggtgctgggcaacaccgaccggcacagcatcaagaagaacctgatcggcgccctgctgttcgacagcggagaaacagccgaggccacccggctgaagagaaccgccagaagaagatacaccagacggaagaaccggatctgctatctgcaagagatcttcagcaacgagatggccaaggtggacgacagcttcttccacagactggaagagtccttcctggtggaagaggataagaagcacgagcggcaccccatcttcggcaacatcgtggacgaggtggcctaccacgagaagtaccccaccatctaccacctgagaaagaaactggtggacagcaccgacaaggccgacctgcggctgatctatctggccctggcccacatgatcaagttccggggccacttcctgatcgagggcgacctgaaccccgacaacagcgacgtggacaagctgttcatccagctggtgcagacctacaaccagctgttcgaggaaaaccccatcaacgccagcggcgtggacgccaaggccatcctgtctgccagactgagcaagagcagacggctggaaaatctgatcgcccagctgcccggcgagaagaagaatggcctgttcggcaacctgattgccctgagcctgggcctgacccccaacttcaagagcaacttcgacctggccgaggatgccaaactgcagctgagcaaggacacctacgacgacgacctggacaacctgctggcccagatcggcgaccagtacgccgacctgtttctggccgccaagaacctgtccgacgccatcctgctgagcgacatcctgagagtgaacaccgagatcaccaaggcccccctgagcgcctctatgatcaagagatacgacgagcaccaccaggacctgaccctgctgaaagctctcgtgcggcagcagctgcctgagaagtacaaagagattttcttcgaccagagcaagaacggctacgccggctacatcgatggcggagccagccaggaagagttctacaagttcatcaagcccatcctggaaaagatggacggcaccgaggaactgctcgtgaagctgaacagagaggacctgctgcggaagcagcggaccttcgacaacggcagcatcccccaccagatccacctgggagagctgcacgccattctgcggcggcaggaagatttttacccattcctgaaggacaaccgggaaaagatcgagaagatcctgaccttccgcatcccctactacgtgggccctctggccaggggaaacagcagattcgcctggatgaccagaaagagcgaggaaaccatcaccccctggaacttcgaggaagtggtggacaagggcgccagcgcccagagcttcatcgagcggatgaccaacttcgataagaacctgcccaacgagaaggtgctgcccaagcacagcctgctgtacgagtacttcaccgtgtacaacgagctgaccaaagtgaaatacgtgaccgagggaatgagaaagcccgccttcctgagcggcgagcagaaaaaagccatcgtggacctgctgttcaagaccaaccggaaagtgaccgtgaagcagctgaaagaggactacttcaagaaaatcgagtgcttcgactccgtggaaatctccggcgtggaagatcggttcaacgcctccctgggcacataccacgatctgctgaaaattatcaaggacaaggacttcctggacaatgaggaaaacgaggacattctggaagatatcgtgctgaccctgacactgtttgaggacagagagatgatcgaggaacggctgaaaacctatgcccacctgttcgacgacaaagtgatgaagcagctgaagcggcggagatacaccggctggggcaggctgagccggaagctgatcaacggcatccgggacaagcagtccggcaagacaatcctggatttcctgaagtccgacggcttcgccaacagaaacttcatgcagctgatccacgacgacagcctgacctttaaagaggacatccagaaagcccaggtgtccggccagggcgatagcctgcacgagcacattgccaatctggccggcagccccgccattaagaagggcatcctgcagacagtgaaggtggtggacgagctcgtgaaagtgatgggccggcacaagcccgagaacatcgtgatcgaaatggccagagagaaccagaccacccagaagggacagaagaacagccgcgagagaatgaagcggatcgaagagggcatcaaagagctgggcagccagatcctgaaagaacaccccgtggaaaacacccagctgcagaacgagaagctgtacctgtactacctgcagaatgggcgggatatgtacgtggaccaggaactggacatcaaccggctgtccgactacgatgtggacgctatcgtgcctcagagctttctgaaggacgactccatcgataacaaagtgctgactcggagcgacaagaaccggggcaagagcgacaacgtgccctccgaagaggtcgtgaagaagatgaagaactactggcgccagctgctgaatgccaagctgattacccagaggaagttcgacaatctgaccaaggccgagagaggcggcctgagcgaactggataaggccggcttcatcaagagacagctggtggaaacccggcagatcacaaagcacgtggcacagatcctggactcccggatgaacactaagtacgacgagaacgacaaactgatccgggaagtgaaagtgatcaccctgaagtccaagctggtgtccgatttccggaaggatttccagttttacaaagtgcgcgagatcaacaactaccaccacgcccacgacgcctacctgaacgccgtcgtgggaaccgccctgatcaaaaagtaccctaagctggaaagcgagttcgtgtacggcgactacaaggtgtacgacgtgcggaagatgatcgccaagagcgagcaggaaatcggcaaggctaccgccaagtacttcttctacagcaacatcatgaactttttcaagaccgagattaccctggccaacggcgagatccggaagcggcctctgatcgagacaaacggcgaaacaggcgagatcgtgtgggataagggccgggactttgccaccgtgcggaaagtgctgtctatgccccaagtgaatatcgtgaaaaagaccgaggtgcagacaggcggcttcagcaaagagtctatcctgcccaagaggaacagcgacaagctgatcgccagaaagaaggactgggaccctaagaagtacggcggcttcgacagccccaccgtggcctattctgtgctggtggtggccaaagtggaaaagggcaagtccaagaaactgaagagtgtgaaagagctgctggggatcaccatcatggaaagaagcagcttcgagaagaatcccatcgactttctggaagccaagggctacaaagaagtgaaaaaggacctgatcatcaagctgcctaagtactccctgttcgagctggaaaacggccggaagagaatgctggcctctgccggcgaactgcagaagggaaacgaactggccctgccctccaaatatgtgaacttcctgtacctggccagccactatgagaagctgaagggctcccccgaggataatgagcagaaacagctgtttgtggaacagcacaaacactacctggacgagatcatcgagcagatcagcgagttctccaagagagtgatcctggccgacgctaatctggacaaggtgctgagcgcctacaacaagcacagagacaagcctatcagagagcaggccgagaatatcatccacctgtttaccctgaccaatctgggagcccctgccgccttcaagtactttgacaccaccatcgaccggaagaggtacaccagcaccaaagaggtgctggacgccaccctgatccaccagagcatcaccggcctgtacgagacacggatcgacctgtctcagctgggaggcgacagcggaagtgagaccccaggtacatccgaatcagcaacgcctgaaagcaccggtatgaacaattcacaggggagagtgacattcgaagacgtgaccgtgaacttcacccagggagaatggcagcgcttgaacccagaacaaaggaacctctatcgggacgtgatgctggaaaactactcaaatttggtgagcgttgggcagggtgagaccactaagcctgacgtgatcctgagattggaacagggcaaggagccttggctcgaggaagaggaagtcctgggctcagggagggccgagaaaaacggtgatataggaggccagatatggaagcctaaggacgtcaaggagagcctgagcgctgattacaaagatgatgacgataaagccccaaaaaagaagagaaaggtaccgaagaaaaaaagaaaggtc

SEQ ID NO: 2226 - protein, 2129 aa, Synthetic construct
MPKKKRKVPKKKRKVNHDQEFDPPKVYPPVPAEKRKPIRVLSLFDGIATGLLVLKDLGIQVDRYIASEVCEDSITVGMVRHQGKIMYVGDVRSVTQKHIQEWGPFDLVIGGSPCNDLSIVNPARKGLYEGTGRLFFEFYRLLHDARPKEGDDRPFFWLFENVVAMGVSDKRDISRFLESNPVMIDAKEVSAAHRARYFWGNLPGMNRPLASTVNDKLELQECLEHGRIAKFSKVRTITTRSNSIKQGKDQHFPVFMNEKEDILWCTEMERVFGFPVHYTDVSNMSRLARQRLLGRSWSVPVIRHLFAPLKEYFACVSSGNSNANSRGPSFSSGLVPLSLRGSHMGPMEIYKTVSAWKRQPVRVLSLFRNIDKVLKSLGFLESGSGSGGGTLKYVEDVTNVVRRDVEKWGPFDLVYGSTQPLGSSCDRCPGWYMFQFHRILQYALPRQESQRPFFWIFMDNLLLTEDDQETTTRFLQTEAVTLQDVRGRDYQNAMRVWSNIPGLKSKHAPLTPKEEEYLQAQVRSRSKLDAPKVDLLVKNCLLPLREYFKYFSQNSLPLGGPSSGAPPPSGGSPAGSPTSTEEGTSESATPESGPGTSTEPSEGSAPGSPAGSPTSTEEGTSTEPSEGSAPGTSTEPSEMDKKYSIGLAIGTNSVGWAVITDEYKVPSKKFKVLGNTDRHSIKKNLIGALLFDSGETAEATRLKRTARRRYTRRKNRICYLQEIFSNEMAKVDDSFFHRLEESFLVEEDKKHERHPIFGNIVDEVAYHEKYPTIYHLRKKLVDSTDKADLRLIYLALAHMIKFRGHFLIEGDLNPDNSDVDKLFIQLVQTYNQLFEENPINASGVDAKAILSARLSKSRRLENLIAQLPGEKKNGLFGNLIALSLGLTPNFKSNFDLAEDAKLQLSKDTYDDDLDNLLAQIGDQYADLFLAAKNLSDAILLSDILRVNTEITKAPLSASMIKRYDEHHQDLTLLKALVRQQLPEKYKEIFFDQSKNGYAGYIDGGASQEEFYKFIKPILEKMDGTEELLVKLNREDLLRKQRTFDNGSIPHQIHLGELHAILRRQEDFYPFLKDNREKIEKILTFRIPYYVGPLARGNSRFAWMTRKSEETITPWNFEEVVDKGASAQSFIERMTNFDKNLPNEKVLPKHSLLYEYFTVYNELTKVKYVTEGMRKPAFLSGEQKKAIVDLLFKTNRKVTVKQLKEDYFKKIECFDSVEISGVEDRFNASLGTYHDLLKIIKDKDFLDNEENEDILEDIVLTLTLFEDREMIEERLKTYAHLFDDKVMKQLKRRRYTGWGRLSRKLINGIRDKQSGKTILDFLKSDGFANRNFMQLIHDDSLTFKEDIQKAQVSGQGDSLHEHIANLAGSPAIKKGILQTVKVVDELVKVMGRHKPENIVIEMARENQTTQKGQKNSRERMKRIEEGIKELGSQILKEHPVENTQLQNEKLYLYYLQNGRDMYVDQELDINRLSDYDVDAIVPQSFLKDDSIDNKVLTRSDKNRGKSDNVPSEEVVKKMKNYWRQLLNAKLITQRKFDNLTKAERGGLSELDKAGFIKRQLVETRQITKHVAQILDSRMNTKYDENDKLIREVKVITLKSKLVSDFRKDFQFYKVREINNYHHAHDAYLNAVVGTALIKKYPKLESEFVYGDYKVYDVRKMIAKSEQEIGKATAKYFFYSNIMNFFKTEITLANGEIRKRPLIETNGETGEIVWDKGRDFATVRKVLSMPQVNIVKKTEVQTGGFSKESILPKRNSDKLIARKKDWDPKKYGGFDSPTVAYSVLVVAKVEKGKSKKLKSVKELLGITIMERSSFEKNPIDFLEAKGYKEVKKDLIIKLPKYSLFELENGRKRMLASAGELQKGNELALPSKYVNFLYLASHYEKLKGSPEDNEQKQLFVEQHKHYLDEIIEQISEFSKRVILADANLDKVLSAYNKHRDKPIREQAENIIHLFTLTNLGAPAAFKYFDTTIDRKRYTSTKEVLDATLIHQSITGLYETRIDLSQLGGDSGSETPGTSESATPESTGNKKLEAVGTGIEPKAMSQGLVTFGDVAVDFSQEEWEWLNPIQRNLYRKVMLENYRNLASLGLCVSKPDVISSLEQGKEPWSADYKDDDDKAPKKKRKVPKKKRKV

SEQ ID NO: 2227 - DNA, 6390 bp, Synthetic construct
  source 1..6390: mol_type = other DNA
atgccaaaaaagaagagaaaggtaccgaagaaaaaaagaaaggtatacaaccatgaccaggaattcgaccccccaaaggtttacccacctgtgccagctgagaagaggaagcccatccgcgtgctgtctctctttgatgggattgctacagggctcctggtgctgaaggacctgggcatccaagtggaccgctacattgcctccgaggtgtgtgaggactccatcacggtgggcatggtgcggcaccagggaaagatcatgtacgtcggggacgtccgcagcgtcacacagaagcatatccaggagtggggcccattcgacctggtgattggaggcagtccctgcaatgacctctccattgtcaaccctgcccgcaagggactttatgagggtactggccgcctcttctttgagttctaccgcctcctgcatgatgcgcggcccaaggagggagatgatcgccccttcttctggctctttgagaatgtggtggccatgggcgttagtgacaagagggacatctcgcgatttcttgagtctaaccccgtgatgattgacgccaaagaagtgtctgctgcacacagggcccgttacttctggggtaaccttcctggcatgaacaggcctttggcatccactgtgaatgataagctggagctgcaagagtgtctggagcacggcagaatagccaagttcagcaaagtgaggaccattaccaccaggtcaaactctataaagcagggcaaagaccagcatttccccgtcttcatgaacgagaaggaggacatcctgtggtgcactgaaatggaaagggtgtttggcttccccgtccactacacagacgtctccaacatgagccgcttggcgaggcagagactgctgggccgatcgtggagcgtgccggtcatccgccacctcttcgctccgctgaaggaatattttgcttgtgtgtctagcggcaatagtaacgctaacagccgcgggccgagcttcagcagcggcctggtgccgttaagcttgcgcggcagccatatgggccctatggagatatacaagacagtgtctgcatggaagagacagccagtgcgggtactgagcctcttcagaaacatcgacaaggtactaaagagtttgggcttcttggaaagcggttctggttctgggggaggaacgctgaagtacgtggaagatgtcacaaatgtcgtgaggagagacgtggagaaatggggcccctttgacctggtgtacggctcgacgcagcccctaggcagctcttgtgatcgctgtcccggctggtacatgttccagttccaccggatcctgcagtatgcgctgcctcgccaggagagtcagcggcccttcttctggatattcatggacaatctgctgctgactgaggatgaccaagagacaactacccgcttccttcagacagaggctgtgaccctccaggatgtccgtggcagagactaccagaatgctatgcgggtgtggagcaacattccagggctgaagagcaagcatgcgcccctgaccccaaaggaagaagagtatctgcaagcccaagtcagaagcaggagcaagctggacgccccgaaagttgacctcctggtgaagaactgccttctcccgctgagagagtacttcaagtatttttctcaaaactcacttcctcttggagggccgagctctggcgcacccccaccaagtggagggtctcctgccgggtccccaacatctactgaagaaggcaccagcgaatccgcaacgcccgagtcaggccctggtacctccacagaaccatctgaaggtagtgcgcctggttccccagctggaagccctacttccaccgaagaaggcacgtcaaccgaaccaagtgaaggatctgcccctgggaccagcactgaaccatctgagatggacaagaagtacagcatcggcctggccatcggcaccaactctgtgggctgggccgtgatcaccgacgagtacaaggtgcccagcaagaaattcaaggtgctgggcaacaccgaccggcacagcatcaagaagaacctgatcggcgccctgctgttcgacagcggagaaacagccgaggccacccggctgaagagaaccgccagaagaagatacaccagacggaagaaccggatctgctatctgcaagagatcttcagcaacgagatggccaaggtggacgacagcttcttccacagactggaagagtccttcctggtggaagaggataagaagcacgagcggcaccccatcttcggcaacatcgtggacgaggtggcctaccacgagaagtaccccaccatctaccacctgagaaagaaactggtggacagcaccgacaaggccgacctgcggctgatctatctggccctggcccacatgatcaagttccggggccacttcctgatcgagggcgacctgaaccccgacaacagcgacgtggacaagctgttcatccagctggtgcagacctacaaccagctgttcgaggaaaaccccatcaacgccagcggcgtggacgccaaggccatcctgtctgccagactgagcaagagcagacggctggaaaatctgatcgcccagctgcccggcgagaagaagaatggcctgttcggcaacctgattgccctgagcctgggcctgacccccaacttcaagagcaacttcgacctggccgaggatgccaaactgcagctgagcaaggacacctacgacgacgacctggacaacctgctggcccagatcggcgaccagtacgccgacctgtttctggccgccaagaacctgtccgacgccatcctgctgagcgacatcctgagagtgaacaccgagatcaccaaggcccccctgagcgcctctatgatcaagagatacgacgagcaccaccaggacctgaccctgctgaaagctctcgtgcggcagcagctgcctgagaagtacaaagagattttcttcgaccagagcaagaacggctacgccggctacatcgatggcggagccagccaggaagagttctacaagttcatcaagcccatcctggaaaagatggacggcaccgaggaactgctcgtgaagctgaacagagaggacctgctgcggaagcagcggaccttcgacaacggcagcatcccccaccagatccacctgggagagctgcacgccattctgcggcggcaggaagatttttacccattcctgaaggacaaccgggaaaagatcgagaagatcctgaccttccgcatcccctactacgtgggccctctggccaggggaaacagcagattcgcctggatgaccagaaagagcgaggaaaccatcaccccctggaacttcgaggaagtggtggacaagggcgccagcgcccagagcttcatcgagcggatgaccaacttcgataagaacctgcccaacgagaaggtgctgcccaagcacagcctgctgtacgagtacttcaccgtgtacaacgagctgaccaaagtgaaatacgtgaccgagggaatgagaaagcccgccttcctgagcggcgagcagaaaaaagccatcgtggacctgctgttcaagaccaaccggaaagtgaccgtgaagcagctgaaagaggactacttcaagaaaatcgagtgcttcgactccgtggaaatctccggcgtggaagatcggttcaacgcctccctgggcacataccacgatctgctgaaaattatcaaggacaaggacttcctggacaatgaggaaaacgaggacattctggaagatatcgtgctgaccctgacactgtttgaggacagagagatgatcgaggaacggctgaaaacctatgcccacctgttcgacgacaaagtgatgaagcagctgaagcggcggagatacaccggctggggcaggctgagccggaagctgatcaacggcatccgggacaagcagtccggcaagacaatcctggatttcctgaagtccgacggcttcgccaacagaaacttcatgcagctgatccacgacgacagcctgacctttaaagaggacatccagaaagcccaggtgtccggccagggcgatagcctgcacgagcacattgccaatctggccggcagccccgccattaagaagggcatcctgcagacagtgaaggtggtggacgagctcgtgaaagtgatgggccggcacaagcccgagaacatcgtgatcgaaatggccagagagaaccagaccacccagaagggacagaagaacagccgcgagagaatgaagcggatcgaagagggcatcaaagagctgggcagccagatcctgaaagaacaccccgtggaaaacacccagctgcagaacgagaagctgtacctgtactacctgcagaatgggcgggatatgtacgtggaccaggaactggacatcaaccggctgtccgactacgatgtggacgctatcgtgcctcagagctttctgaaggacgactccatcgataacaaagtgctgactcggagcgacaagaaccggggcaagagcgacaacgtgccctccgaagaggtcgtgaagaagatgaagaactactggcgccagctgctgaatgccaagctgattacccagaggaagttcgacaatctgaccaaggccgagagaggcggcctgagcgaactggataaggccggcttcatcaagagacagctggtggaaacccggcagatcacaaagcacgtggcacagatcctggactcccggatgaacactaagtacgacgagaacgacaaactgatccgggaagtgaaagtgatcaccctgaagtccaagctggtgtccgatttccggaaggatttccagttttacaaagtgcgcgagatcaacaactaccaccacgcccacgacgcctacctgaacgccgtcgtgggaaccgccctgatcaaaaagtaccctaagctggaaagcgagttcgtgtacggcgactacaaggtgtacgacgtgcggaagatgatcgccaagagcgagcaggaaatcggcaaggctaccgccaagtacttcttctacagcaacatcatgaactttttcaagaccgagattaccctggccaacggcgagatccggaagcggcctctgatcgagacaaacggcgaaacaggcgagatcgtgtgggataagggccgggactttgccaccgtgcggaaagtgctgtctatgccccaagtgaatatcgtgaaaaagaccgaggtgcagacaggcggcttcagcaaagagtctatcctgcccaagaggaacagcgacaagctgatcgccagaaagaaggactgggaccctaagaagtacggcggcttcgacagccccaccgtggcctattctgtgctggtggtggccaaagtggaaaagggcaagtccaagaaactgaagagtgtgaaagagctgctggggatcaccatcatggaaagaagcagcttcgagaagaatcccatcgactttctggaagccaagggctacaaagaagtgaaaaaggacctgatcatcaagctgcctaagtactccctgttcgagctggaaaacggccggaagagaatgctggcctctgccggcgaactgcagaagggaaacgaactggccctgccctccaaatatgtgaacttcctgtacctggccagccactatgagaagctgaagggctcccccgaggataatgagcagaaacagctgtttgtggaacagcacaaacactacctggacgagatcatcgagcagatcagcgagttctccaagagagtgatcctggccgacgctaatctggacaaggtgctgagcgcctacaacaagcacagagacaagcctatcagagagcaggccgagaatatcatccacctgtttaccctgaccaatctgggagcccctgccgccttcaagtactttgacaccaccatcgaccggaagaggtacaccagcaccaaagaggtgctggacgccaccctgatccaccagagcatcaccggcctgtacgagacacggatcgacctgtctcagctgggaggcgacagcggaagtgagaccccaggtacatccgaatcagcaacgcctgaaagcaccggtaacaaaaagcttgaggccgtcggaaccggaatcgaaccaaaagcaatgtcccagggtttggtgacatttggcgacgtggctgtcgatttttcccaggaagagtgggagtggctcaatcctatccagaggaacttgtaccggaaggtgatgctggagaattatagaaatttggcatcactggggttgtgcgttagcaaaccagatgttatatcttccctggaacagggaaaggagccctggagcgctgattacaaagatgatgacgataaagccccaaaaaagaagagaaaggtaccgaagaaaaaaagaaaggtc

SEQ ID NO: 2228 - protein, 2295 aa, Synthetic construct
MPKKKRKVPKKKRKVYNHDQEFDPPKVYPPVPAEKRKPIRVLSLFDGIATGLLVLKDLGIQVDRYIASEVCEDSITVGMVRHQGKIMYVGDVRSVTQKHIQEWGPFDLVIGGSPCNDLSIVNPARKGLYEGTGRLFFEFYRLLHDARPKEGDDRPFFWLFENVVAMGVSDKRDISRFLESNPVMIDAKEVSAAHRARYFWGNLPGMNRPLASTVNDKLELQECLEHGRIAKFSKVRTITTRSNSIKQGKDQHFPVFMNEKEDILWCTEMERVFGFPVHYTDVSNMSRLARQRLLGRSWSVPVIRHLFAPLKEYFACVSSGNSNANSRGPSFSSGLVPLSLRGSHMAAIPALDPEAEPSMDVILVGSSELSSSVSPGTGRDLIAYEVKANQRNIEDICICCGSLQVHTQHPLFEGGICAPCKDKFLDALFLYDDDGYQSYCSICCSGETLLICGNPDCTRCYCFECVDSLVGPGTSGKVHAMSNWVCYLCLPSSRSGLLQRRRKWRSQLKAFYDRESENPLEMFETVPVWRRQPVRVLSLFEDIKKELTSLGFLESGSDPGQLKHVVDVTDTVRKDVEEWGPFDLVYGATPPLGHTCDRPPSWYLFQFHRLLQYARPKPGSPRPFFWMFVDNLVLNKEDLDVASRFLEMEPVTIPDVHGGSLQNAVRVWSNIPAIRSRHWALVSEEELSLLAQNKQSSKLAAKWPTKLVKNCFLPLREYFKYFSTELTSSPGGPSSGAPPPSGGSPAGSPTSTEEGTSESATPESGPGTSTEPSEGSAPGSPAGSPTSTEEGTSTEPSEGSAPGTSTEPSELEDKKYSIGLAIGTNSVGWAVITDEYKVPSKKFKVLGNTDRHSIKKNLIGALLFDSGETAEATRLKRTARRRYTRRKNRICYLQEIFSNEMAKVDDSFFHRLEESFLVEEDKKHERHPIFGNIVDEVAYHEKYPTIYHLRKKLVDSTDKADLRLIYLALAHMIKFRGHFLIEGDLNPDNSDVDKLFIQLVQTYNQLFEENPINASGVDAKAILSARLSKSRRLENLIAQLPGEKKNGLFGNLIALSLGLTPNFKSNFDLAEDAKLQLSKDTYDDDLDNLLAQIGDQYADLFLAAKNLSDAILLSDILRVNTEITKAPLSASMIKRYDEHHQDLTLLKALVRQQLPEKYKEIFFDQSKNGYAGYIDGGASQEEFYKFIKPILEKMDGTEELLVKLNREDLLRKQRTFDNGSIPHQIHLGELHAILRRQEDFYPFLKDNREKIEKILTFRIPYYVGPLARGNSRFAWMTRKSEETITPWNFEEVVDKGASAQSFIERMTNFDKNLPNEKVLPKHSLLYEYFTVYNELTKVKYVTEGMRKPAFLSGEQKKAIVDLLFKTNRKVTVKQLKEDYFKKIECFDSVEISGVEDRFNASLGTYHDLLKIIKDKDFLDNEENEDILEDIVLTLTLFEDREMIEERLKTYAHLFDDKVMKQLKRRRYTGWGRLSRKLINGIRDKQSGKTILDFLKSDGFANRNFMQLIHDDSLTFKEDIQKAQVSGQGDSLHEHIANLAGSPAIKKGILQTVKVVDELVKVMGRHKPENIVIEMARENQTTQKGQKNSRERMKRIEEGIKELGSQILKEHPVENTQLQNEKLYLYYLQNGRDMYVDQELDINRLSDYDVDAIVPQSFLKDDSIDNKVLTRSDKNRGKSDNVPSEEVVKKMKNYWRQLLNAKLITQRKFDNLTKAERGGLSELDKAGFIKRQLVETRQITKHVAQILDSRMNTKYDENDKLIREVKVITLKSKLVSDFRKDFQFYKVREINNYHHAHDAYLNAVVGTALIKKYPKLESEFVYGDYKVYDVRKMIAKSEQEIGKATAKYFFYSNIMNFFKTEITLANGEIRKRPLIETNGETGEIVWDKGRDFATVRKVLSMPQVNIVKKTEVQTGGFSKESILPKRNSDKLIARKKDWDPKKYGGFDSPTVAYSVLVVAKVEKGKSKKLKSVKELLGITIMERSSFEKNPIDFLEAKGYKEVKKDLIIKLPKYSLFELENGRKRMLASAGELQKGNELALPSKYVNFLYLASHYEKLKGSPEDNEQKQLFVEQHKHYLDEIIEQISEFSKRVILADANLDKVLSAYNKHRDKPIREQAENIIHLFTLTNLGAPAAFKYFDTTIDRKRYTSTKEVLDATLIHQSITGLYETRIDLSQLGGDSPKKKRKVGVDGSSGSETPGTSESATPESRTLVTFKDVFVDFTREEWKLLDTAQQIVYRNVMLENYKNLVSLGYQLTKPDVILRLEKGEEPSADYKDDDDKAPKKKRKVPKKKRKV

SEQ ID NO: 2229 - DNA, 6897 bp, Synthetic construct
  source 1..6897: mol_type = other DNA
atgggtaccatgccaaaaaagaagagaaaggtaccgaagaaaaaaagaaaggtatacaatcacgatcaggagttcgacccccctaaggtgtacccaccagtgcctgcagagaagaggaagccaatccgggtgctgagcctgtttgatggcatcgccaccggcctgctggtgctgaaggatctgggcatccaggtggaccggtacatcgcctccgaggtgtgcgaggattctatcaccgtgggcatggtgcgccaccagggcaagatcatgtatgtgggcgacgtgcggtccgtgacacagaagcacatccaggagtggggcccattcgatctggtgatcggcggcagcccctgtaatgacctgtccatcgtgaaccctgcaaggaagggactgtacgagggaaccggccggctgttctttgagttttatagactgctgcacgacgccaggcctaaggagggcgacgatagaccattcttttggctgttcgagaatgtggtggctatgggcgtgagcgataagagggacatctccaggtttctggagtctaaccccgtgatgatcgatgcaaaggaggtgtccgccgcacacagagccaggtatttctggggcaatctgccaggaatgaacaggccactggcaagcaccgtgaatgacaagctggagctgcaggagtgcctggagcacggaaggatcgccaagttttccaaggtgcgcacaatcaccacacggagcaattccatcaagcagggcaaggatcagcacttccccgtgttcatgaacgagaaggaggacatcctgtggtgtaccgagatggagagagtgttcggctttccagtgcactacacagacgtgtctaacatgagcaggctggcaaggcagcggctgctgggcagatcttggagcgtgcccgtgatcaggcacctgttcgcccctctgaaggagtattttgcctgcgtgagcagcggcaactccaatgccaacagccggggcccctctttcagctccggattggtgcctctgagcctgaggggctcccacatggcagcaatccccgccctggaccccgaggccgagcctagcatggacgtgatcctggtgggctctagcgagctgtcctctagcgtgtctccaggaaccggaagggatctgatcgcatacgaggtgaaggccaatcagcggaacatcgaggacatctgtatctgctgtggcagcctgcaggtgcacacacagcacccactgttcgagggaggaatctgcgcaccctgtaaggataagttcctggacgccctgtttctgtacgacgatgacggctaccagtcctattgctctatctgctgttccggcgagaccctgctgatctgcggcaatccagattgtacaaggtgctattgttttgagtgcgtggactctctggtgggaccaggcaccagcggaaaggtgcacgccatgtccaactgggtgtgctacctgtgcctgccatcctctcgcagcggactgctgcagcggagaaggaagtggagatcccagctgaaggccttctatgatagggagtctgagaaccccctggagatgtttgagaccgtgccagtgtggcgccggcagcccgtgagggtgctgagcctgttcgaggatatcaagaaggagctgacatccctgggctttctggagtccggctctgaccccggacagctgaagcacgtggtggatgtgaccgacacagtgcggaaggatgtggaggagtggggccctttcgacctggtgtacggagcaacccctccactgggacacacatgcgacagacccccttcttggtacctgttccagtttcaccgcctgctgcagtatgcaaggccaaagccaggcagccctagaccattcttttggatgttcgtggataatctggtgctgaacaaggaggatctggacgtggccagcaggtttctggagatggagccagtgaccatcccagacgtgcacggcggctccctgcagaatgccgtgcgcgtgtggtctaacatccctgccatcagaagcaggcactgggcactggtgagcgaggaggagctgtccctgctggcccagaataagcagagcagcaagctggccgccaagtggcctacaaagctggtgaagaactgcttcctgccactgcgggagtacttcaagtatttttccaccgagctgacatctagcctgggaggaccctcctctggcgccccaccacctagcggcggctcccctgccggctctccaaccagcacagaggagggcaccagcgagtccgccacaccagagtctggacctggcaccagcacagagccatccgagggctctgccccaggctctcctgcaggcagccctacctccaccgaagagggcaccagcacagagccttctgagggcagcgccccaggcacctctacagagccaagcgagctcgaggacaagaagtacagcatcggcctggccatcggcaccaactctgtgggctgggccgtgatcaccgacgagtacaaggtgcccagcaagaaattcaaggtgctgggcaacaccgaccggcacagcatcaagaagaacctgatcggagccctgctgttcgacagcggcgaaacagccgaggccacccggctgaagagaaccgccagaagaagatacaccagacggaagaaccggatctgctatctgcaagagatcttcagcaacgagatggccaaggtggacgacagcttcttccacagactggaagagtccttcctggtggaagaggataagaagcacgagcggcaccccatcttcggcaacatcgtggacgaggtggcctaccacgagaagtaccccaccatctaccacctgagaaagaaactggtggacagcaccgacaaggccgacctgcggctgatctatctggccctggcccacatgatcaagttccggggccacttcctgatcgagggcgacctgaaccccgacaacagcgacgtggacaagctgttcatccagctggtgcagacctacaaccagctgttcgaggaaaaccccatcaacgccagcggcgtggacgccaaggccatcctgtctgccagactgagcaagagcagacggctggaaaatctgatcgcccagctgcccggcgagaagaagaatggcctgttcggcaacctgattgccctgagcctgggcctgacccccaacttcaagagcaacttcgacctggccgaggatgccaaactgcagctgagcaaggacacctacgacgacgacctggacaacctgctggcccagatcggcgaccagtacgccgacctgtttctggccgccaagaacctgtccgacgccatcctgctgagcgacatcctgagagtgaacaccgagatcaccaaggcccccctgagcgcctctatgatcaagagatacgacgagcaccaccaggacctgaccctgctgaaagctctcgtgcggcagcagctgcctgagaagtacaaagagattttcttcgaccagagcaagaacggctacgccggctacattgacggcggagccagccaggaagagttctacaagttcatcaagcccatcctggaaaagatggacggcaccgaggaactgctcgtgaagctgaacagagaggacctgctgcggaagcagcggaccttcgacaacggcagcatcccccaccagatccacctgggagagctgcacgccattctgcggcggcaggaagatttttacccattcctgaaggacaaccgggaaaagatcgagaagatcctgaccttccgcatcccctactacgtgggccctctggccaggggaaacagcagattcgcctggatgaccagaaagagcgaggaaaccatcaccccctggaacttcgaggaagtggtggacaagggcgcttccgcccagagcttcatcgagcggatgaccaacttcgataagaacctgcccaacgagaaggtgctgcccaagcacagcctgctgtacgagtacttcaccgtgtataacgagctgaccaaagtgaaatacgtgaccgagggaatgagaaagcccgccttcctgagcggcgagcagaaaaaggccatcgtggacctgctgttcaagaccaaccggaaagtgaccgtgaagcagctgaaagaggactacttcaagaaaatcgagtgcttcgactccgtggaaatctccggcgtggaagatcggttcaacgcctccctgggcacataccacgatctgctgaaaattatcaaggacaaggacttcctggacaatgaggaaaacgaggacattctggaagatatcgtgctgaccctgacactgtttgaggacagagagatgatcgaggaacggctgaaaacctatgcccacctgttcgacgacaaagtgatgaagcagctgaagcggcggagatacaccggctggggcaggctgagccggaagctgatcaacggcatccgggacaagcagtccggcaagacaatcctggatttcctgaagtccgacggcttcgccaacagaaacttcatgcagctgatccacgacgacagcctgacctttaaagaggacatccagaaagcccaggtgtccggccagggcgatagcctgcacgagcacattgccaatctggccggcagccccgccattaagaagggcatcctgcagacagtgaaggtggtggacgagctcgtgaaagtgatgggccggcacaagcccgagaacatcgtgatcgaaatggccagagagaaccagaccacccagaagggacagaagaacagccgcgagagaatgaagcggatcgaagagggcatcaaagagctgggcagccagatcctgaaagaacaccccgtggaaaacacccagctgcagaacgagaagctgtacctgtactacctgcagaatgggcgggatatgtacgtggaccaggaactggacatcaaccggctgtccgactacgatgtggacgccatcgtgcctcagagctttctgaaggacgactccatcgacaacaaggtgctgaccagaagcgacaagaaccggggcaagagcgacaacgtgccctccgaagaggtcgtgaagaagatgaagaactactggcggcagctgctgaacgccaagctgattacccagagaaagttcgacaatctgaccaaggccgagagaggcggcctgagcgaactggataaggccggcttcatcaagagacagctggtggaaacccggcagatcacaaagcacgtggcacagatcctggactcccggatgaacactaagtacgacgagaatgacaagctgatccgggaagtgaaagtgatcaccctgaagtccaagctggtgtccgatttccggaaggatttccagttttacaaagtgcgcgagatcaacaactaccaccacgcccacgacgcctacctgaacgccgtcgtgggaaccgccctgatcaaaaagtaccctaagctggaaagcgagttcgtgtacggcgactacaaggtgtacgacgtgcggaagatgatcgccaagagcgagcaggaaatcggcaaggctaccgccaagtacttcttctacagcaacatcatgaactttttcaagaccgagattaccctggccaacggcgagatccggaagcggcctctgatcgagacaaacggcgaaaccggggagatcgtgtgggataagggccgggattttgccaccgtgcggaaagtgctgagcatgccccaagtgaatatcgtgaaaaagaccgaggtgcagacaggcggcttcagcaaagagtctatcctgcccaagaggaacagcgataagctgatcgccagaaagaaggactgggaccctaagaagtacggcggcttcgacagccccaccgtggcctattctgtgctggtggtggccaaagtggaaaagggcaagtccaagaaactgaagagtgtgaaagagctgctggggatcaccatcatggaaagaagcagcttcgagaagaatcccatcgactttctggaagccaagggctacaaagaagtgaaaaaggacctgatcatcaagctgcctaagtactccctgttcgagctggaaaacggccggaagagaatgctggcctctgccggcgaactgcagaagggaaacgaactggccctgccctccaaatatgtgaacttcctgtacctggccagccactatgagaagctgaagggctcccccgaggataatgagcagaaacagctgtttgtggaacagcacaagcactacctggacgagatcatcgagcagatcagcgagttctccaagagagtgatcctggccgacgctaatctggacaaagtgctgtccgcctacaacaagcaccgggataagcccatcagagagcaggccgagaatatcatccacctgtttaccctgaccaatctgggagcccctgccgccttcaagtactttgacaccaccatcgaccggaagaggtacaccagcaccaaagaggtgctggacgccaccctgatccaccagagcatcaccggcctgtacgagacacggatcgacctgtctcagctgggaggcgacagccccaagaagaagagaaaggtgggagtcgacggatccagcggctccgagaccccaggcacatctgagagcgccacccctgagtcccggaccctggtgaccttcaaggatgtatttgtggacttcaccagggaggagtggaagctgctggacactgctcagcagatcgtgtacagaaatgtgatgctggagaactataagaacctggtttccttgggttatcagcttactaagccagatgtgatcctccggttggagaagggagaagagcccagcgctgattacaaagatgatgacgataaagccccaaaaaagaagagaaaggtaccgaagaaaaaaagaaaggtctga

SEQ ID NO: 2230 - protein, 2318 aa, Synthetic construct; identical to SEQ ID NO: 661

SEQ ID NO: 2231 - DNA, 6957 bp, Synthetic construct
  source 1..6957: mol_type = other DNA
atgggtaccatgccaaaaaagaagagaaaggtaccgaagaaaaaaagaaaggtatacaatcacgatcaggagttcgacccccctaaggtgtacccaccagtgcctgcagagaagaggaagccaatccgggtgctgagcctgtttgatggcatcgccaccggcctgctggtgctgaaggatctgggcatccaggtggaccggtacatcgcctccgaggtgtgcgaggattctatcaccgtgggcatggtgcgccaccagggcaagatcatgtatgtgggcgacgtgcggtccgtgacacagaagcacatccaggagtggggcccattcgatctggtgatcggcggcagcccctgtaatgacctgtccatcgtgaaccctgcaaggaagggactgtacgagggaaccggccggctgttctttgagttttatagactgctgcacgacgccaggcctaaggagggcgacgatagaccattcttttggctgttcgagaatgtggtggctatgggcgtgagcgataagagggacatctccaggtttctggagtctaaccccgtgatgatcgatgcaaaggaggtgtccgccgcacacagagccaggtatttctggggcaatctgccaggaatgaacaggccactggcaagcaccgtgaatgacaagctggagctgcaggagtgcctggagcacggaaggatcgccaagttttccaaggtgcgcacaatcaccacacggagcaattccatcaagcagggcaaggatcagcacttccccgtgttcatgaacgagaaggaggacatcctgtggtgtaccgagatggagagagtgttcggctttccagtgcactacacagacgtgtctaacatgagcaggctggcaaggcagcggctgctgggcagatcttggagcgtgcccgtgatcaggcacctgttcgcccctctgaaggagtattttgcctgcgtgagcagcggcaactccaatgccaacagccggggcccctctttcagctccggattggtgcctctgagcctgaggggctcccacatggcagcaatccccgccctggaccccgaggccgagcctagcatggacgtgatcctggtgggctctagcgagctgtcctctagcgtgtctccaggaaccggaagggatctgatcgcatacgaggtgaaggccaatcagcggaacatcgaggacatctgtatctgctgtggcagcctgcaggtgcacacacagcacccactgttcgagggaggaatctgcgcaccctgtaaggataagttcctggacgccctgtttctgtacgacgatgacggctaccagtcctattgctctatctgctgttccggcgagaccctgctgatctgcggcaatccagattgtacaaggtgctattgttttgagtgcgtggactctctggtgggaccaggcaccagcggaaaggtgcacgccatgtccaactgggtgtgctacctgtgcctgccatcctctcgcagcggactgctgcagcggagaaggaagtggagatcccagctgaaggccttctatgatagggagtctgagaaccccctggagatgtttgagaccgtgccagtgtggcgccggcagcccgtgagggtgctgagcctgttcgaggatatcaagaaggagctgacatccctgggctttctggagtccggctctgaccccggacagctgaagcacgtggtggatgtgaccgacacagtgcggaaggatgtggaggagtggggccctttcgacctggtgtacggagcaacccctccactgggacacacatgcgacagacccccttcttggtacctgttccagtttcaccgcctgctgcagtatgcaaggccaaagccaggcagccctagaccattcttttggatgttcgtggataatctggtgctgaacaaggaggatctggacgtggccagcaggtttctggagatggagccagtgaccatcccagacgtgcacggcggctccctgcagaatgccgtgcgcgtgtggtctaacatccctgccatcagaagcaggcactgggcactggtgagcgaggaggagctgtccctgctggcccagaataagcagagcagcaagctggccgccaagtggcctacaaagctggtgaagaactgcttcctgccactgcgggagtacttcaagtatttttccaccgagctgacatctagcctgggaggaccctcctctggcgccccaccacctagcggcggctcccctgccggctctccaaccagcacagaggagggcaccagcgagtccgccacaccagagtctggacctggcaccagcacagagccatccgagggctctgccccgggctctcctgcaggcagccctacctccaccgaagagggcaccagcacagagccttctgagggcagcgccccaggcacctctacagagccaagcgagctcgaggacaagaagtacagcatcggcctggccatcggcaccaactctgtgggctgggccgtgatcaccgacgagtacaaggtgcccagcaagaaattcaaggtgctgggcaacaccgaccggcacagcatcaagaagaacctgatcggagccctgctgttcgacagcggcgaaacagccgaggccacccggctgaagagaaccgccagaagaagatacaccagacggaagaaccggatctgctatctgcaagagatcttcagcaacgagatggccaaggtggacgacagcttcttccacagactggaagagtccttcctggtggaagaggataagaagcacgagcggcaccccatcttcggcaacatcgtggacgaggtggcctaccacgagaagtaccccaccatctaccacctgagaaagaaactggtggacagcaccgacaaggccgacctgcggctgatctatctggccctggcccacatgatcaagttccggggccacttcctgatcgagggcgacctgaaccccgacaacagcgacgtggacaagctgttcatccagctggtgcagacctacaaccagctgttcgaggaaaaccccatcaacgccagcggcgtggacgccaaggccatcctgtctgccagactgagcaagagcagacggctggaaaatctgatcgcccagctgcccggcgagaagaagaatggcctgttcggcaacctgattgccctgagcctgggcctgacccccaacttcaagagcaacttcgacctggccgaggatgccaaactgcagctgagcaaggacacctacgacgacgacctggacaacctgctggcccagatcggcgaccagtacgccgacctgtttctggccgccaagaacctgtccgacgccatcctgctgagcgacatcctgagagtgaacaccgagatcaccaaggcccccctgagcgcctctatgatcaagagatacgacgagcaccaccaggacctgaccctgctgaaagctctcgtgcggcagcagctgcctgagaagtacaaagagattttcttcgaccagagcaagaacggctacgccggctacattgacggcggagccagccaggaagagttctacaagttcatcaagcccatcctggaaaagatggacggcaccgaggaactgctcgtgaagctgaacagagaggacctgctgcggaagcagcggaccttcgacaacggcagcatcccccaccagatccacctgggagagctgcacgccattctgcggcggcaggaagatttttacccattcctgaaggacaaccgggaaaagatcgagaagatcctgaccttccgcatcccctactacgtgggccctctggccaggggaaacagcagattcgcctggatgaccagaaagagcgaggaaaccatcaccccctggaacttcgaggaagtggtggacaagggcgcttccgcccagagcttcatcgagcggatgaccaacttcgataagaacctgcccaacgagaaggtgctgcccaagcacagcctgctgtacgagtacttcaccgtgtataacgagctgaccaaagtgaaatacgtgaccgagggaatgagaaagcccgccttcctgagcggcgagcagaaaaaggccatcgtggacctgctgttcaagaccaaccggaaagtgaccgtgaagcagctgaaagaggactacttcaagaaaatcgagtgcttcgactccgtggaaatctccggcgtggaagatcggttcaacgcctccctgggcacataccacgatctgctgaaaattatcaaggacaaggacttcctggacaatgaggaaaacgaggacattctggaagatatcgtgctgaccctgacactgtttgaggacagagagatgatcgaggaacggctgaaaacctatgcccacctgttcgacgacaaagtgatgaagcagctgaagcggcggagatacaccggctggggcaggctgagccggaagctgatcaacggcatccgggacaagcagtccggcaagacaatcctggatttcctgaagtccgacggcttcgccaacagaaacttcatgcagctgatccacgacgacagcctgacctttaaagaggacatccagaaagcccaggtgtccggccagggcgatagcctgcacgagcacattgccaatctggccggcagccccgccattaagaagggcatcctgcagacagtgaaggtggtggacgagctcgtgaaagtgatgggccggcacaagcccgagaacatcgtgatcgaaatggccagagagaaccagaccacccagaagggacagaagaacagccgcgagagaatgaagcggatcgaagagggcatcaaagagctgggcagccagatcctgaaagaacaccccgtggaaaacacccagctgcagaacgagaagctgtacctgtactacctgcagaatgggcgggatatgtacgtggaccaggaactggacatcaaccggctgtccgactacgatgtggacgccatcgtgcctcagagctttctgaaggacgactccatcgacaacaaggtgctgaccagaagcgacaagaaccggggcaagagcgacaacgtgccctccgaagaggtcgtgaagaagatgaagaactactggcggcagctgctgaacgccaagctgattacccagagaaagttcgacaatctgaccaaggccgagagaggcggcctgagcgaactggataaggccggcttcatcaagagacagctggtggaaacccggcagatcacaaagcacgtggcacagatcctggactcccggatgaacactaagtacgacgagaatgacaagctgatccgggaagtgaaagtgatcaccctgaagtccaagctggtgtccgatttccggaaggatttccagttttacaaagtgcgcgagatcaacaactaccaccacgcccacgacgcctacctgaacgccgtcgtgggaaccgccctgatcaaaaagtaccctaagctggaaagcgagttcgtgtacggcgactacaaggtgtacgacgtgcggaagatgatcgccaagagcgagcaggaaatcggcaaggctaccgccaagtacttcttctacagcaacatcatgaactttttcaagaccgagattaccctggccaacggcgagatccggaagcggcctctgatcgagacaaacggcgaaaccggggagatcgtgtgggataagggccgggattttgccaccgtgcggaaagtgctgagcatgccccaagtgaatatcgtgaaaaagaccgaggtgcagacaggcggcttcagcaaagagtctatcctgcccaagaggaacagcgataagctgatcgccagaaagaaggactgggaccctaagaagtacggcggcttcgacagccccaccgtggcctattctgtgctggtggtggccaaagtggaaaagggcaagtccaagaaactgaagagtgtgaaagagctgctggggatcaccatcatggaaagaagcagcttcgagaagaatcccatcgactttctggaagccaagggctacaaagaagtgaaaaaggacctgatcatcaagctgcctaagtactccctgttcgagctggaaaacggccggaagagaatgctggcctctgccggcgaactgcagaagggaaacgaactggccctgccctccaaatatgtgaacttcctgtacctggccagccactatgagaagctgaagggctcccccgaggataatgagcagaaacagctgtttgtggaacagcacaagcactacctggacgagatcatcgagcagatcagcgagttctccaagagagtgatcctggccgacgctaatctggacaaagtgctgtccgcctacaacaagcaccgggataagcccatcagagagcaggccgagaatatcatccacctgtttaccctgaccaatctgggagcccctgccgccttcaagtactttgacaccaccatcgaccggaagaggtacaccagcaccaaagaggtgctggacgccaccctgatccaccagagcatcaccggcctgtacgagacacggatcgacctgtctcagctgggaggcgacagccccaagaagaagagaaaggtgggagtcgacggatccagcggctccgagaccccaggcacatctgagagcgccacccctgagtccaccggtaacaaaaagcttgaggccgtcggaaccggaatcgaaccaaaagcaatgtcccagggtttggtgacatttggcgacgtggctgtcgatttttcccaggaagagtgggagtggctcaatcctatccagaggaacttgtaccggaaggtgatgctggagaattatagaaatttggcatcactggggttgtgcgttagcaaaccagatgttatatcttccctggaacagggaaaggagccctggagcgctgattacaaagatgatgacgataaagcccccaagaagaaaaggaaggtcccaaagaaaaaaagaaaggtgtga

SEQ ID NO: 2232 - protein, 2338 aa, Synthetic construct; identical to SEQ ID NO: 663

SEQ ID NO: 2233 - DNA, 7017 bp, Synthetic construct
  source 1..7017: mol_type = other DNA
atgggtaccatgccaaaaaagaagagaaaggtaccgaagaaaaaaagaaaggtatacaatcacgatcaggagttcgacccccctaaggtgtacccaccagtgcctgcagagaagaggaagccaatccgggtgctgagcctgtttgatggcatcgccaccggcctgctggtgctgaaggatctgggcatccaggtggaccggtacatcgcctccgaggtgtgcgaggattctatcaccgtgggcatggtgcgccaccagggcaagatcatgtatgtgggcgacgtgcggtccgtgacacagaagcacatccaggagtggggcccattcgatctggtgatcggcggcagcccctgtaatgacctgtccatcgtgaaccctgcaaggaagggactgtacgagggaaccggccggctgttctttgagttttatagactgctgcacgacgccaggcctaaggagggcgacgatagaccattcttttggctgttcgagaatgtggtggctatgggcgtgagcgataagagggacatctccaggtttctggagtctaaccccgtgatgatcgatgcaaaggaggtgtccgccgcacacagagccaggtatttctggggcaatctgccaggaatgaacaggccactggcaagcaccgtgaatgacaagctggagctgcaggagtgcctggagcacggaaggatcgccaagttttccaaggtgcgcacaatcaccacacggagcaattccatcaagcagggcaaggatcagcacttccccgtgttcatgaacgagaaggaggacatcctgtggtgtaccgagatggagagagtgttcggctttccagtgcactacacagacgtgtctaacatgagcaggctggcaaggcagcggctgctgggcagatcttggagcgtgcccgtgatcaggcacctgttcgcccctctgaaggagtattttgcctgcgtgagcagcggcaactccaatgccaacagccggggcccctctttcagctccggattggtgcctctgagcctgaggggctcccacatggcagcaatccccgccctggaccccgaggccgagcctagcatggacgtgatcctggtgggctctagcgagctgtcctctagcgtgtctccaggaaccggaagggatctgatcgcatacgaggtgaaggccaatcagcggaacatcgaggacatctgtatctgctgtggcagcctgcaggtgcacacacagcacccactgttcgagggaggaatctgcgcaccctgtaaggataagttcctggacgccctgtttctgtacgacgatgacggctaccagtcctattgctctatctgctgttccggcgagaccctgctgatctgcggcaatccagattgtacaaggtgctattgttttgagtgcgtggactctctggtgggaccaggcaccagcggaaaggtgcacgccatgtccaactgggtgtgctacctgtgcctgccatcctctcgcagcggactgctgcagcggagaaggaagtggagatcccagctgaaggccttctatgatagggagtctgagaaccccctggagatgtttgagaccgtgccagtgtggcgccggcagcccgtgagggtgctgagcctgttcgaggatatcaagaaggagctgacatccctgggctttctggagtccggctctgaccccggacagctgaagcacgtggtggatgtgaccgacacagtgcggaaggatgtggaggagtggggccctttcgacctggtgtacggagcaacccctccactgggacacacatgcgacagacccccttcttggtacctgttccagtttcaccgcctgctgcagtatgcaaggccaaagccaggcagccctagaccattcttttggatgttcgtggataatctggtgctgaacaaggaggatctggacgtggccagcaggtttctggagatggagccagtgaccatcccagacgtgcacggcggctccctgcagaatgccgtgcgcgtgtggtctaacatccctgccatcagaagcaggcactgggcactggtgagcgaggaggagctgtccctgctggcccagaataagcagagcagcaagctggccgccaagtggcctacaaagctggtgaagaactgcttcctgccactgcgggagtacttcaagtatttttccaccgagctgacatctagcctgggaggaccctcctctggcgccccaccacctagcggcggctcccctgccggctctccaaccagcacagaggagggcaccagcgagtccgccacaccagagtctggacctggcaccagcacagagccatccgagggctctgccccaggctctcctgcaggcagccctacctccaccgaagagggcaccagcacagagccttctgagggcagcgccccaggcacctctacagagccaagcgagctcgaggacaagaagtacagcatcggcctggccatcggcaccaactctgtgggctgggccgtgatcaccgacgagtacaaggtgcccagcaagaaattcaaggtgctgggcaacaccgaccggcacagcatcaagaagaacctgatcggagccctgctgttcgacagcggcgaaacagccgaggccacccggctgaagagaaccgccagaagaagatacaccagacggaagaaccggatctgctatctgcaagagatcttcagcaacgagatggccaaggtggacgacagcttcttccacagactggaagagtccttcctggtggaagaggataagaagcacgagcggcaccccatcttcggcaacatcgtggacgaggtggcctaccacgagaagtaccccaccatctaccacctgagaaagaaactggtggacagcaccgacaaggccgacctgcggctgatctatctggccctggcccacatgatcaagttccggggccacttcctgatcgagggcgacctgaaccccgacaacagcgacgtggacaagctgttcatccagctggtgcagacctacaaccagctgttcgaggaaaaccccatcaacgccagcggcgtggacgccaaggccatcctgtctgccagactgagcaagagcagacggctggaaaatctgatcgcccagctgcccggcgagaagaagaatggcctgttcggcaacctgattgccctgagcctgggcctgacccccaacttcaagagcaacttcgacctggccgaggatgccaaactgcagctgagcaaggacacctacgacgacgacctggacaacctgctggcccagatcggcgaccagtacgccgacctgtttctggccgccaagaacctgtccgacgccatcctgctgagcgacatcctgagagtgaacaccgagatcaccaaggcccccctgagcgcctctatgatcaagagatacgacgagcaccaccaggacctgaccctgctgaaagctctcgtgcggcagcagctgcctgagaagtacaaagagattttcttcgaccagagcaagaacggctacgccggctacattgacggcggagccagccaggaagagttctacaagttcatcaagcccatcctggaaaagatggacggcaccgaggaactgctcgtgaagctgaacagagaggacctgctgcggaagcagcggaccttcgacaacggcagcatcccccaccagatccacctgggagagctgcacgccattctgcggcggcaggaagatttttacccattcctgaaggacaaccgggaaaagatcgagaagatcctgaccttccgcatcccctactacgtgggccctctggccaggggaaacagcagattcgcctggatgaccagaaagagcgaggaaaccatcaccccctggaacttcgaggaagtggtggacaagggcgcttccgcccagagcttcatcgagcggatgaccaacttcgataagaacctgcccaacgagaaggtgctgcccaagcacagcctgctgtacgagtacttcaccgtgtataacgagctgaccaaagtgaaatacgtgaccgagggaatgagaaagcccgccttcctgagcggcgagcagaaaaaggccatcgtggacctgctgttcaagaccaaccggaaagtgaccgtgaagcagctgaaagaggactacttcaagaaaatcgagtgcttcgactccgtggaaatctccggcgtggaagatcggttcaacgcctccctgggcacataccacgatctgctgaaaattatcaaggacaaggacttcctggacaatgaggaaaacgaggacattctggaagatatcgtgctgaccctgacactgtttgaggacagagagatgatcgaggaacggctgaaaacctatgcccacctgttcgacgacaaagtgatgaagcagctgaagcggcggagatacaccggctggggcaggctgagccggaagctgatcaacggcatccgggacaagcagtccggcaagacaatcctggatttcctgaagtccgacggcttcgccaacagaaacttcatgcagctgatccacgacgacagcctgacctttaaagaggacatccagaaagcccaggtgtccggccagggcgatagcctgcacgagcacattgccaatctggccggcagccccgccattaagaagggcatcctgcagacagtgaaggtggtggacgagctcgtgaaagtgatgggccggcacaagcccgagaacatcgtgatcgaaatggccagagagaaccagaccacccagaagggacagaagaacagccgcgagagaatgaagcggatcgaagagggcatcaaagagctgggcagccagatcctgaaagaacaccccgtggaaaacacccagctgcagaacgagaagctgtacctgtactacctgcagaatgggcgggatatgtacgtggaccaggaactggacatcaaccggctgtccgactacgatgtggacgccatcgtgcctcagagctttctgaaggacgactccatcgacaacaaggtgctgaccagaagcgacaagaaccggggcaagagcgacaacgtgccctccgaagaggtcgtgaagaagatgaagaactactggcggcagctgctgaacgccaagctgattacccagagaaagttcgacaatctgaccaaggccgagagaggcggcctgagcgaactggataaggccggcttcatcaagagacagctggtggaaacccggcagatcacaaagcacgtggcacagatcctggactcccggatgaacactaagtacgacgagaatgacaagctgatccgggaagtgaaagtgatcaccctgaagtccaagctggtgtccgatttccggaaggatttccagttttacaaagtgcgcgagatcaacaactaccaccacgcccacgacgcctacctgaacgccgtcgtgggaaccgccctgatcaaaaagtaccctaagctggaaagcgagttcgtgtacggcgactacaaggtgtacgacgtgcggaagatgatcgccaagagcgagcaggaaatcggcaaggctaccgccaagtacttcttctacagcaacatcatgaactttttcaagaccgagattaccctggccaacggcgagatccggaagcggcctctgatcgagacaaacggcgaaaccggggagatcgtgtgggataagggccgggattttgccaccgtgcggaaagtgctgagcatgccccaagtgaatatcgtgaaaaagaccgaggtgcagacaggcggcttcagcaaagagtctatcctgcccaagaggaacagcgataagctgatcgccagaaagaaggactgggaccctaagaagtacggcggcttcgacagccccaccgtggcctattctgtgctggtggtggccaaagtggaaaagggcaagtccaagaaactgaagagtgtgaaagagctgctggggatcaccatcatggaaagaagcagcttcgagaagaatcccatcgactttctggaagccaagggctacaaagaagtgaaaaaggacctgatcatcaagctgcctaagtactccctgttcgagctggaaaacggccggaagagaatgctggcctctgccggcgaactgcagaagggaaacgaactggccctgccctccaaatatgtgaacttcctgtacctggccagccactatgagaagctgaagggctcccccgaggataatgagcagaaacagctgtttgtggaacagcacaagcactacctggacgagatcatcgagcagatcagcgagttctccaagagagtgatcctggccgacgctaatctggacaaagtgctgtccgcctacaacaagcaccgggataagcccatcagagagcaggccgagaatatcatccacctgtttaccctgaccaatctgggagcccctgccgccttcaagtactttgacaccaccatcgaccggaagaggtacaccagcaccaaagaggtgctggacgccaccctgatccaccagagcatcaccggcctgtacgagacacggatcgacctgtctcagctgggaggcgacagccccaagaagaagagaaaggtgggagtcgacggatccagcggctccgagaccccaggcacatctgagagcgccacccctgagtccaccggtatgaacaattcacaggggagagtgacattcgaagacgtgaccgtgaacttcacccagggagaatggcagcgcttgaacccagaacaaaggaacctctatcgggacgtgatgctggaaaactactcaaatttggtgagcgttgggcagggtgagaccactaagcctgacgtgatcctgagattggaacagggcaaggagccttggctcgaggaagaggaagtcctgggctcagggagggccgagaaaaacggtgatataggaggccagatatggaagcctaaggacgtcaaggagagcctgagcgctgattacaaagatgatgacgataaagcccccaagaagaaaaggaaggtcccaaagaaaaaaagaaaggtgtga

SEQ ID NO: 2234 - protein, 2318 aa, Synthetic construct; identical to SEQ ID NO: 662

SEQ ID NO: 2235 - DNA, 6957 bp, Synthetic construct
  source 1..6957: mol_type = other DNA
atgggtaccatgccaaaaaagaagagaaaggtaccgaagaaaaaaagaaaggtatacaatcacgatcaggagttcgacccccctaaggtgtacccaccagtgcctgcagagaagaggaagccaatccgggtgctgagcctgtttgatggcatcgccaccggcctgctggtgctgaaggatctgggcatccaggtggaccggtacatcgcctccgaggtgtgcgaggattctatcaccgtgggcatggtgcgccaccagggcaagatcatgtatgtgggcgacgtgcggtccgtgacacagaagcacatccaggagtggggcccattcgatctggtgatcggcggcagcccctgtaatgacctgtccatcgtgaaccctgcaaggaagggactgtacgagggaaccggccggctgttctttgagttttatagactgctgcacgacgccaggcctaaggagggcgacgatagaccattcttttggctgttcgagaatgtggtggctatgggcgtgagcgataagagggacatctccaggtttctggagtctaaccccgtgatgatcgatgcaaaggaggtgtccgccgcacacagagccaggtatttctggggcaatctgccaggaatgaacaggccactggcaagcaccgtgaatgacaagctggagctgcaggagtgcctggagcacggaaggatcgccaagttttccaaggtgcgcacaatcaccacacggagcaattccatcaagcagggcaaggatcagcacttccccgtgttcatgaacgagaaggaggacatcctgtggtgtaccgagatggagagagtgttcggctttccagtgcactacacagacgtgtctaacatgagcaggctggcaaggcagcggctgctgggcagatcttggagcgtgcccgtgatcaggcacctgttcgcccctctgaaggagtattttgcctgcgtgagcagcggcaactccaatgccaacagccggggcccctctttcagctccggattggtgcctctgagcctgaggggctcccacatggcagcaatccccgccctggaccccgaggccgagcctagcatggacgtgatcctggtgggctctagcgagctgtcctctagcgtgtctccaggaaccggaagggatctgatcgcatacgaggtgaaggccaatcagcggaacatcgaggacatctgtatctgctgtggcagcctgcaggtgcacacacagcacccactgttcgagggaggaatctgcgcaccctgtaaggataagttcctggacgccctgtttctgtacgacgatgacggctaccagtcctattgctctatctgctgttccggcgagaccctgctgatctgcggcaatccagattgtacaaggtgctattgttttgagtgcgtggactctctggtgggaccaggcaccagcggaaaggtgcacgccatgtccaactgggtgtgctacctgtgcctgccatcctctcgcagcggactgctgcagcggagaaggaagtggagatcccagctgaaggccttctatgatagggagtctgagaaccccctggagatgtttgagaccgtgccagtgtggcgccggcagcccgtgagggtgctgagcctgttcgaggatatcaagaaggagctgacatccctgggctttctggagtccggctctgaccccggacagctgaagcacgtggtggatgtgaccgacacagtgcggaaggatgtggaggagtggggccctttcgacctggtgtacggagcaacccctccactgggacacacatgcgacagacccccttcttggtacctgttccagtttcaccgcctgctgcagtatgcaaggccaaagccaggcagccctagaccattcttttggatgttcgtggataatctggtgctgaacaaggaggatctggacgtggccagcaggtttctggagatggagccagtgaccatcccagacgtgcacggcggctccctgcagaatgccgtgcgcgtgtggtctaacatccctgccatcagaagcaggcactgggcactggtgagcgaggaggagctgtccctgctggcccagaataagcagagcagcaagctggccgccaagtggcctacaaagctggtgaagaactgcttcctgccactgcgggagtacttcaagtatttttccaccgagctgacatctagcctgggaggaccctcctctggcgccccaccacctagcggcggctcccctgccggctctccaaccagcacagaggagggcaccagcgagtccgccacaccagagtctggacctggcaccagcacagagccatccgagggctctgccccaggctctcctgcaggcagccctacctccaccgaagagggcaccagcacagagccttctgagggcagcgccccaggcacctctacagagccaagcgagctcgaggacaagaagtacagcatcggcctggccatcggcaccaactctgtgggctgggccgtgatcaccgacgagtacaaggtgcccagcaagaaattcaaggtgctgggcaacaccgaccggcacagcatcaagaagaacctgatcggagccctgctgttcgacagcggcgaaacagccgaggccacccggctgaagagaaccgccagaagaagatacaccagacggaagaaccggatctgctatctgcaagagatcttcagcaacgagatggccaaggtggacgacagcttcttccacagactggaagagtccttcctggtggaagaggataagaagcacgagcggcaccccatcttcggcaacatcgtggacgaggtggcctaccacgagaagtaccccaccatctaccacctgagaaagaaactggtggacagcaccgacaaggccgacctgcggctgatctatctggccctggcccacatgatcaagttccggggccacttcctgatcgagggcgacctgaaccccgacaacagcgacgtggacaagctgttcatccagctggtgcagacctacaaccagctgttcgaggaaaaccccatcaacgccagcggcgtggacgccaaggccatcctgtctgccagactgagcaagagcagacggctggaaaatctgatcgcccagctgcccggcgagaagaagaatggcctgttcggcaacctgattgccctgagcctgggcctgacccccaacttcaagagcaacttcgacctggccgaggatgccaaactgcagctgagcaaggacacctacgacgacgacctggacaacctgctggcccagatcggcgaccagtacgccgacctgtttctggccgccaagaacctgtccgacgccatcctgctgagcgacatcctgagagtgaacaccgagatcaccaaggcccccctgagcgcctctatgatcaagagatacgacgagcaccaccaggacctgaccctgctgaaagctctcgtgcggcagcagctgcctgagaagtacaaagagattttcttcgaccagagcaagaacggctacgccggctacattgacggcggagccagccaggaagagttctacaagttcatcaagcccatcctggaaaagatggacggcaccgaggaactgctcgtgaagctgaacagagaggacctgctgcggaagcagcggaccttcgacaacggcagcatcccccaccagatccacctgggagagctgcacgccattctgcggcggcaggaagatttttacccattcctgaaggacaaccgggaaaagatcgagaagatcctgaccttccgcatcccctactacgtgggccctctggccaggggaaacagcagattcgcctggatgaccagaaagagcgaggaaaccatcaccccctggaacttcgaggaagtggtggacaagggcgcttccgcccagagcttcatcgagcggatgaccaacttcgataagaacctgcccaacgagaaggtgctgcccaagcacagcctgctgtacgagtacttcaccgtgtataacgagctgaccaaagtgaaatacgtgaccgagggaatgagaaagcccgccttcctgagcggcgagcagaaaaaggccatcgtggacctgctgttcaagaccaaccggaaagtgaccgtgaagcagctgaaagaggactacttcaagaaaatcgagtgcttcgactccgtggaaatctccggcgtggaagatcggttcaacgcctccctgggcacataccacgatctgctgaaaattatcaaggacaaggacttcctggacaatgaggaaaacgaggacattctggaagatatcgtgctgaccctgacactgtttgaggacagagagatgatcgaggaacggctgaaaacctatgcccacctgttcgacgacaaagtgatgaagcagctgaagcggcggagatacaccggctggggcaggctgagccggaagctgatcaacggcatccgggacaagcagtccggcaagacaatcctggatttcctgaagtccgacggcttcgccaacagaaacttcatgcagctgatccacgacgacagcctgacctttaaagaggacatccagaaagcccaggtgtccggccagggcgatagcctgcacgagcacattgccaatctggccggcagccccgccattaagaagggcatcctgcagacagtgaaggtggtggacgagctcgtgaaagtgatgggccggcacaagcccgagaacatcgtgatcgaaatggccagagagaaccagaccacccagaagggacagaagaacagccgcgagagaatgaagcggatcgaagagggcatcaaagagctgggcagccagatcctgaaagaacaccccgtggaaaacacccagctgcagaacgagaagctgtacctgtactacctgcagaatgggcgggatatgtacgtggaccaggaactggacatcaaccggctgtccgactacgatgtggacgccatcgtgcctcagagctttctgaaggacgactccatcgacaacaaggtgctgaccagaagcgacaagaaccggggcaagagcgacaacgtgccctccgaagaggtcgtgaagaagatgaagaactactggcggcagctgctgaacgccaagctgattacccagagaaagttcgacaatctgaccaaggccgagagaggcggcctgagcgaactggataaggccggcttcatcaagagacagctggtggaaacccggcagatcacaaagcacgtggcacagatcctggactcccggatgaacactaagtacgacgagaatgacaagctgatccgggaagtgaaagtgatcaccctgaagtccaagctggtgtccgatttccggaaggatttccagttttacaaagtgcgcgagatcaacaactaccaccacgcccacgacgcctacctgaacgccgtcgtgggaaccgccctgatcaaaaagtaccctaagctggaaagcgagttcgtgtacggcgactacaaggtgtacgacgtgcggaagatgatcgccaagagcgagcaggaaatcggcaaggctaccgccaagtacttcttctacagcaacatcatgaactttttcaagaccgagattaccctggccaacggcgagatccggaagcggcctctgatcgagacaaacggcgaaaccggggagatcgtgtgggataagggccgggattttgccaccgtgcggaaagtgctgagcatgccccaagtgaatatcgtgaaaaagaccgaggtgcagacaggcggcttcagcaaagagtctatcctgcccaagaggaacagcgataagctgatcgccagaaagaaggactgggaccctaagaagtacggcggcttcgacagccccaccgtggcctattctgtgctggtggtggccaaagtggaaaagggcaagtccaagaaactgaagagtgtgaaagagctgctggggatcaccatcatggaaagaagcagcttcgagaagaatcccatcgactttctggaagccaagggctacaaagaagtgaaaaaggacctgatcatcaagctgcctaagtactccctgttcgagctggaaaacggccggaagagaatgctggcctctgccggcgaactgcagaagggaaacgaactggccctgccctccaaatatgtgaacttcctgtacctggccagccactatgagaagctgaagggctcccccgaggataatgagcagaaacagctgtttgtggaacagcacaagcactacctggacgagatcatcgagcagatcagcgagttctccaagagagtgatcctggccgacgctaatctggacaaagtgctgtccgcctacaacaagcaccgggataagcccatcagagagcaggccgagaatatcatccacctgtttaccctgaccaatctgggagcccctgccgccttcaagtactttgacaccaccatcgaccggaagaggtacaccagcaccaaagaggtgctggacgccaccctgatccaccagagcatcaccggcctgtacgagacacggatcgacctgtctcagctgggaggcgacagccccaagaagaagagaaaggtgggagtcgacggatccagcggctccgagaccccaggcacatctgagagcgccacccctgagtccaccggtgactccgttgctttcgaggacgtggccgtgaacttcacacttgaggaatgggccttgctcgacccaagtcagaagaatctgtacagagacgtgatgcgggagacattcaggaatctcgccagtgtcggaaagcagtgggaagaccagaacatcgaagatcctttcaagataccacggcgcaatatctcccacattcctgagaggctgtgtgaatctaaggaaggcggacaaggtgaggaaagcgctgattacaaagatgatgacgataaagcccccaagaagaaaaggaaggtcccaaagaaaaaaagaaaggtgtga

SEQ ID NO: 2236 - protein, 2275 aa, Synthetic construct
MYPYDVPDYASPKKKRKVNHDQEFDPPKVYPPVPAEKRKPIRVLSLFDGIATGLLVLKDLGIQVDRYIASEVCEDSITVGMVRHQGKIMYVGDVRSVTQKHIQEWGPFDLVIGGSPCNDLSIVNPARKGLYEGTGRLFFEFYRLLHDARPKEGDDRPFFWLFENVVAMGVSDKRDISRFLESNPVMIDAKEVSAAHRARYFWGNLPGMNRPLASTVNDKLELQECLEHGRIAKFSKVRTITTRSNSIKQGKDQHFPVFMNEKEDILWCTEMERVFGFPVHYTDVSNMSRLARQRLLGRSWSVPVIRHLFAPLKEYFACVSSGNSNANSRGPSFSSGLVPLSLRGSHMAAIPALDPEAEPSMDVILVGSSELSSSVSPGTGRDLIAYEVKANQRNIEDICICCGSLQVHTQHPLFEGGICAPCKDKFLDALFLYDDDGYQSYCSICCSGETLLICGNPDCTRCYCFECVDSLVGPGTSGKVHAMSNWVCYLCLPSSRSGLLQRRRKWRSQLKAFYDRESENPLEMFETVPVWRRQPVRVLSLFEDIKKELTSLGFLESGSDPGQLKHVVDVTDTVRKDVEEWGPFDLVYGATPPLGHTCDRPPSWYLFQFHRLLQYARPKPGSPRPFFWMFVDNLVLNKEDLDVASRFLEMEPVTIPDVHGGSLQNAVRVWSNIPAIRSRHWALVSEEELSLLAQNKQSSKLAAKWPTKLVKNCFLPLREYFKYFSTELTSSLGGPSSGAPPPSGGSPAGSPTSTEEGTSESATPESGPGTSTEPSEGSAPGSPAGSPTSTEEGTSTEPSEGSAPGTSTEPSELEDKKYSIGLAIGTNSVGWAVITDEYKVPSKKFKVLGNTDRHSIKKNLIGALLFDSGETAEATRLKRTARRRYTRRKNRICYLQEIFSNEMAKVDDSFFHRLEESFLVEEDKKHERHPIFGNIVDEVAYHEKYPTIYHLRKKLVDSTDKADLRLIYLALAHMIKFRGHFLIEGDLNPDNSDVDKLFIQLVQTYNQLFEENPINASGVDAKAILSARLSKSRRLENLIAQLPGEKKNGLFGNLIALSLGLTPNFKSNFDLAEDAKLQLSKDTYDDDLDNLLAQIGDQYADLFLAAKNLSDAILLSDILRVNTEITKAPLSASMIKRYDEHHQDLTLLKALVRQQLPEKYKEIFFDQSKNGYAGYIDGGASQEEFYKFIKPILEKMDGTEELLVKLNREDLLRKQRTFDNGSIPHQIHLGELHAILRRQEDFYPFLKDNREKIEKILTFRIPYYVGPLARGNSRFAWMTRKSEETITPWNFEEVVDKGASAQSFIERMTNFDKNLPNEKVLPKHSLLYEYFTVYNELTKVKYVTEGMRKPAFLSGEQKKAIVDLLFKTNRKVTVKQLKEDYFKKIECFDSVEISGVEDRFNASLGTYHDLLKIIKDKDFLDNEENEDILEDIVLTLTLFEDREMIEERLKTYAHLFDDKVMKQLKRRRYTGWGRLSRKLINGIRDKQSGKTILDFLKSDGFANRNFMQLIHDDSLTFKEDIQKAQVSGQGDSLHEHIANLAGSPAIKKGILQTVKVVDELVKVMGRHKPENIVIEMARENQTTQKGQKNSRERMKRIEEGIKELGSQILKEHPVENTQLQNEKLYLYYLQNGRDMYVDQELDINRLSDYDVDAIVPQSFLKDDSIDNKVLTRSDKNRGKSDNVPSEEVVKKMKNYWRQLLNAKLITQRKFDNLTKAERGGLSELDKAGFIKRQLVETRQITKHVAQILDSRMNTKYDENDKLIREVKVITLKSKLVSDFRKDFQFYKVREINNYHHAHDAYLNAVVGTALIKKYPKLESEFVYGDYKVYDVRKMIAKSEQEIGKATAKYFFYSNIMNFFKTEITLANGEIRKRPLIETNGETGEIVWDKGRDFATVRKVLSMPQVNIVKKTEVQTGGFSKESILPKRNSDKLIARKKDWDPKKYGGFDSPTVAYSVLVVAKVEKGKSKKLKSVKELLGITIMERSSFEKNPIDFLEAKGYKEVKKDLIIKLPKYSLFELENGRKRMLASAGELQKGNELALPSKYVNFLYLASHYEKLKGSPEDNEQKQLFVEQHKHYLDEIIEQISEFSKRVILADANLDKVLSAYNKHRDKPIREQAENIIHLFTLTNLGAPAAFKYFDTTIDRKRYTSTKEVLDATLIHQSITGLYETRIDLSQLGGDSPKKKRKVGVDGSSGSETPGTSESATPESRTLVTFKDVFVDFTREEWKLLDTAQQIVYRNVMLENYKNLVSLGYQLTKPDVILRLEKGEEPWLV

SEQ ID NO: 2237 - DNA, 6828 bp, Synthetic construct
  source 1..6828: mol_type = other DNA
atgtacccatacgatgttccagattacgcttcgccgaagaaaaagcgcaaggtcaatcacgatcaggagttcgacccccctaaggtgtacccaccagtgcctgcagagaagaggaagccaatccgggtgctgagcctgtttgatggcatcgccaccggcctgctggtgctgaaggatctgggcatccaggtggaccggtacatcgcctccgaggtgtgcgaggattctatcaccgtgggcatggtgcgccaccagggcaagatcatgtatgtgggcgacgtgcggtccgtgacacagaagcacatccaggagtggggcccattcgatctggtgatcggcggcagcccctgtaatgacctgtccatcgtgaaccctgcaaggaagggactgtacgagggaaccggccggctgttctttgagttttatagactgctgcacgacgccaggcctaaggagggcgacgatagaccattcttttggctgttcgagaatgtggtggctatgggcgtgagcgataagagggacatctccaggtttctggagtctaaccccgtgatgatcgatgcaaaggaggtgtccgccgcacacagagccaggtatttctggggcaatctgccaggaatgaacaggccactggcaagcaccgtgaatgacaagctggagctgcaggagtgcctggagcacggaaggatcgccaagttttccaaggtgcgcacaatcaccacacggagcaattccatcaagcagggcaaggatcagcacttccccgtgttcatgaacgagaaggaggacatcctgtggtgtaccgagatggagagagtgttcggctttccagtgcactacacagacgtgtctaacatgagcaggctggcaaggcagcggctgctgggcagatcttggagcgtgcccgtgatcaggcacctgttcgcccctctgaaggagtattttgcctgcgtgagcagcggcaactccaatgccaacagccggggcccctctttcagctccggattggtgcctctgagcctgaggggctcccacatggcagcaatccccgccctggaccccgaggccgagcctagcatggacgtgatcctggtgggctctagcgagctgtcctctagcgtgtctccaggaaccggaagggatctgatcgcatacgaggtgaaggccaatcagcggaacatcgaggacatctgtatctgctgtggcagcctgcaggtgcacacacagcacccactgttcgagggaggaatctgcgcaccctgtaaggataagttcctggacgccctgtttctgtacgacgatgacggctaccagtcctattgctctatctgctgttccggcgagaccctgctgatctgcggcaatccagattgtacaaggtgctattgttttgagtgcgtggactctctggtgggaccaggcaccagcggaaaggtgcacgccatgtccaactgggtgtgctacctgtgcctgccatcctctcgcagcggactgctgcagcggagaaggaagtggagatcccagctgaaggccttctatgatagggagtctgagaaccccctggagatgtttgagaccgtgccagtgtggcgccggcagcccgtgagggtgctgagcctgttcgaggatatcaagaaggagctgacatccctgggctttctggagtccggctctgaccccggacagctgaagcacgtggtggatgtgaccgacacagtgcggaaggatgtggaggagtggggccctttcgacctggtgtacggagcaacccctccactgggacacacatgcgacagacccccttcttggtacctgttccagtttcaccgcctgctgcagtatgcaaggccaaagccaggcagccctagaccattcttttggatgttcgtggataatctggtgctgaacaaggaggatctggacgtggccagcaggtttctggagatggagccagtgaccatcccagacgtgcacggcggctccctgcagaatgccgtgcgcgtgtggtctaacatccctgccatcagaagcaggcactgggcactggtgagcgaggaggagctgtccctgctggcccagaataagcagagcagcaagctggccgccaagtggcctacaaagctggtgaagaactgcttcctgccactgcgggagtacttcaagtatttttccaccgagctgacatctagcctgggaggaccctcctctggcgccccaccacctagcggcggctcccctgccggctctccaaccagcacagaggagggcaccagcgagtccgccacaccagagtctggacctggcaccagcacagagccatccgagggctctgccccaggctctcctgcaggcagccctacctccaccgaagagggcaccagcacagagccttctgagggcagcgccccaggcacctctacagagccaagcgagctcgaggacaagaagtacagcatcggcctggccatcggcaccaactctgtgggctgggccgtgatcaccgacgagtacaaggtgcccagcaagaaattcaaggtgctgggcaacaccgaccggcacagcatcaagaagaacctgatcggagccctgctgttcgacagcggcgaaacagccgaggccacccggctgaagagaaccgccagaagaagatacaccagacggaagaaccggatctgctatctgcaagagatcttcagcaacgagatggccaaggtggacgacagcttcttccacagactggaagagtccttcctggtggaagaggataagaagcacgagcggcaccccatcttcggcaacatcgtggacgaggtggcctaccacgagaagtaccccaccatctaccacctgagaaagaaactggtggacagcaccgacaaggccgacctgcggctgatctatctggccctggcccacatgatcaagttccggggccacttcctgatcgagggcgacctgaaccccgacaacagcgacgtggacaagctgttcatccagctggtgcagacctacaaccagctgttcgaggaaaaccccatcaacgccagcggcgtggacgccaaggccatcctgtctgccagactgagcaagagcagacggctggaaaatctgatcgcccagctgcccggcgagaagaagaatggcctgttcggcaacctgattgccctgagcctgggcctgacccccaacttcaagagcaacttcgacctggccgaggatgccaaactgcagctgagcaaggacacctacgacgacgacctggacaacctgctggcccagatcggcgaccagtacgccgacctgtttctggccgccaagaacctgtccgacgccatcctgctgagcgacatcctgagagtgaacaccgagatcaccaaggcccccctgagcgcctctatgatcaagagatacgacgagcaccaccaggacctgaccctgctgaaagctctcgtgcggcagcagctgcctgagaagtacaaagagattttcttcgaccagagcaagaacggctacgccggctacattgacggcggagccagccaggaagagttctacaagttcatcaagcccatcctggaaaagatggacggcaccgaggaactgctcgtgaagctgaacagagaggacctgctgcggaagcagcggaccttcgacaacggcagcatcccccaccagatccacctgggagagctgcacgccattctgcggcggcaggaagatttttacccattcctgaaggacaaccgggaaaagatcgagaagatcctgaccttccgcatcccctactacgtgggccctctggccaggggaaacagcagattcgcctggatgaccagaaagagcgaggaaaccatcaccccctggaacttcgaggaagtggtggacaagggcgcttccgcccagagcttcatcgagcggatgaccaacttcgataagaacctgcccaacgagaaggtgctgcccaagcacagcctgctgtacgagtacttcaccgtgtataacgagctgaccaaagtgaaatacgtgaccgagggaatgagaaagcccgccttcctgagcggcgagcagaaaaaggccatcgtggacctgctgttcaagaccaaccggaaagtgaccgtgaagcagctgaaagaggactacttcaagaaaatcgagtgcttcgactccgtggaaatctccggcgtggaagatcggttcaacgcctccctgggcacataccacgatctgctgaaaattatcaaggacaaggacttcctggacaatgaggaaaacgaggacattctggaagatatcgtgctgaccctgacactgtttgaggacagagagatgatcgaggaacggctgaaaacctatgcccacctgttcgacgacaaagtgatgaagcagctgaagcggcggagatacaccggctggggcaggctgagccggaagctgatcaacggcatccgggacaagcagtccggcaagacaatcctggatttcctgaagtccgacggcttcgccaacagaaacttcatgcagctgatccacgacgacagcctgacctttaaagaggacatccagaaagcccaggtgtccggccagggcgatagcctgcacgagcacattgccaatctggccggcagccccgccattaagaagggcatcctgcagacagtgaaggtggtggacgagctcgtgaaagtgatgggccggcacaagcccgagaacatcgtgatcgaaatggccagagagaaccagaccacccagaagggacagaagaacagccgcgagagaatgaagcggatcgaagagggcatcaaagagctgggcagccagatcctgaaagaacaccccgtggaaaacacccagctgcagaacgagaagctgtacctgtactacctgcagaatgggcgggatatgtacgtggaccaggaactggacatcaaccggctgtccgactacgatgtggacgccatcgtgcctcagagctttctgaaggacgactccatcgacaacaaggtgctgaccagaagcgacaagaaccggggcaagagcgacaacgtgccctccgaagaggtcgtgaagaagatgaagaactactggcggcagctgctgaacgccaagctgattacccagagaaagttcgacaatctgaccaaggccgagagaggcggcctgagcgaactggataaggccggcttcatcaagagacagctggtggaaacccggcagatcacaaagcacgtggcacagatcctggactcccggatgaacactaagtacgacgagaatgacaagctgatccgggaagtgaaagtgatcaccctgaagtccaagctggtgtccgatttccggaaggatttccagttttacaaagtgcgcgagatcaacaactaccaccacgcccacgacgcctacctgaacgccgtcgtgggaaccgccctgatcaaaaagtaccctaagctggaaagcgagttcgtgtacggcgactacaaggtgtacgacgtgcggaagatgatcgccaagagcgagcaggaaatcggcaaggctaccgccaagtacttcttctacagcaacatcatgaactttttcaagaccgagattaccctggccaacggcgagatccggaagcggcctctgatcgagacaaacggcgaaaccggggagatcgtgtgggataagggccgggattttgccaccgtgcggaaagtgctgagcatgccccaagtgaatatcgtgaaaaagaccgaggtgcagacaggcggcttcagcaaagagtctatcctgcccaagaggaacagcgataagctgatcgccagaaagaaggactgggaccctaagaagtacggcggcttcgacagccccaccgtggcctattctgtgctggtggtggccaaagtggaaaagggcaagtccaagaaactgaagagtgtgaaagagctgctggggatcaccatcatggaaagaagcagcttcgagaagaatcccatcgactttctggaagccaagggctacaaagaagtgaaaaaggacctgatcatcaagctgcctaagtactccctgttcgagctggaaaacggccggaagagaatgctggcctctgccggcgaactgcagaagggaaacgaactggccctgccctccaaatatgtgaacttcctgtacctggccagccactatgagaagctgaagggctcccccgaggataatgagcagaaacagctgtttgtggaacagcacaagcactacctggacgagatcatcgagcagatcagcgagttctccaagagagtgatcctggccgacgctaatctggacaaagtgctgtccgcctacaacaagcaccgggataagcccatcagagagcaggccgagaatatcatccacctgtttaccctgaccaatctgggagcccctgccgccttcaagtactttgacaccaccatcgaccggaagaggtacaccagcaccaaagaggtgctggacgccaccctgatccaccagagcatcaccggcctgtacgagacacggatcgacctgtctcagctgggaggcgacagccccaagaagaagagaaaggtgggagtcgacggatccagcggctccgagaccccaggcacatctgagagcgccacccctgagtcccggaccctggtgacattcaaggacgtgttcgtggacttcacccgggaggagtggaagctgctggacacagcccagcagatcgtgtacaggaacgtgatgctggagaactataagaatctggtgtctctgggctaccagctgacaaagccagatgtgatcctgcggctggagaagggagaggagccctggctggtgtag

SEQ ID NO: 2238 - protein, 2090 aa, Synthetic construct
MGTMNHDQEFDPPKVYPPVPAEKRKPIRVLSLFDGIATGLLVLKDLGIQVDRYIASEVCEDSITVGMVRHQGKIMYVGDVRSVTQKHIQEWGPFDLVIGGSPCNDLSIVNPARKGLYEGTGRLFFEFYRLLHDARPKEGDDRPFFWLFENVVAMGVSDKRDISRFLESNPVMIDAKEVSAAHRARYFWGNLPGMNRPLASTVNDKLELQECLEHGRIAKFSKVRTITTRSNSIKQGKDQHFPVFMNEKEDILWCTEMERVFGFPVHYTDVSNMSRLARQRLLGRSWSVPVIRHLFAPLKEYFACVSSGNSNANSRGPSFSSGLVPLSLRGSHMGPMEIYKTVSAWKRQPVRVLSLFRNIDKVLKSLGFLESGSGSGGGTLKYVEDVTNVVRRDVEKWGPFDLVYGSTQPLGSSCDRCPGWYMFQFHRILQYALPRQESQRPFFWIFMDNLLLTEDDQETTTRFLQTEAVTLQDVRGRDYQNAMRVWSNIPGLKSKHAPLTPKEEEYLQAQVRSRSKLDAPKVDLLVKNCLLPLREYFKYFSQNSLPLGGPSSGAPPPSGGSPAGSPTSTEEGTSESATPESGPGTSTEPSEGSAPGSPAGSPTSTEEGTSTEPSEGSAPGTSTEPSEPKKKRKVYMDKKYSIGLAIGTNSVGWAVITDEYKVPSKKFKVLGNTDRHSIKKNLIGALLFDSGETAEATRLKRTARRRYTRRKNRICYLQEIFSNEMAKVDDSFFHRLEESFLVEEDKKHERHPIFGNIVDEVAYHEKYPTIYHLRKKLVDSTDKADLRLIYLALAHMIKFRGHFLIEGDLNPDNSDVDKLFIQLVQTYNQLFEENPINASGVDAKAILSARLSKSRRLENLIAQLPGEKKNGLFGNLIALSLGLTPNFKSNFDLAEDAKLQLSKDTYDDDLDNLLAQIGDQYADLFLAAKNLSDAILLSDILRVNTEITKAPLSASMIKRYDEHHQDLTLLKALVRQQLPEKYKEIFFDQSKNGYAGYIDGGASQEEFYKFIKPILEKMDGTEELLVKLNREDLLRKQRTFDNGSIPHQIHLGELHAILRRQEDFYPFLKDNREKIEKILTFRIPYYVGPLARGNSRFAWMTRKSEETITPWNFEEVVDKGASAQSFIERMTNFDKNLPNEKVLPKHSLLYEYFTVYNELTKVKYVTEGMRKPAFLSGEQKKAIVDLLFKTNRKVTVKQLKEDYFKKIECFDSVEISGVEDRFNASLGTYHDLLKIIKDKDFLDNEENEDILEDIVLTLTLFEDREMIEERLKTYAHLFDDKVMKQLKRRRYTGWGRLSRKLINGIRDKQSGKTILDFLKSDGFANRNFMQLIHDDSLTFKEDIQKAQVSGQGDSLHEHIANLAGSPAIKKGILQTVKVVDELVKVMGRHKPENIVIEMARENQTTQKGQKNSRERMKRIEEGIKELGSQILKEHPVENTQLQNEKLYLYYLQNGRDMYVDQELDINRLSDYDVDAIVPQSFLKDDSIDNKVLTRSDKNRGKSDNVPSEEVVKKMKNYWRQLLNAKLITQRKFDNLTKAERGGLSELDKAGFIKRQLVETRQITKHVAQILDSRMNTKYDENDKLIREVKVITLKSKLVSDFRKDFQFYKVREINNYHHAHDAYLNAVVGTALIKKYPKLESEFVYGDYKVYDVRKMIAKSEQEIGKATAKYFFYSNIMNFFKTEITLANGEIRKRPLIETNGETGEIVWDKGRDFATVRKVLSMPQVNIVKKTEVQTGGFSKESILPKRNSDKLIARKKDWDPKKYGGFDSPTVAYSVLVVAKVEKGKSKKLKSVKELLGITIMERSSFEKNPIDFLEAKGYKEVKKDLIIKLPKYSLFELENGRKRMLASAGELQKGNELALPSKYVNFLYLASHYEKLKGSPEDNEQKQLFVEQHKHYLDEIIEQISEFSKRVILADANLDKVLSAYNKHRDKPIREQAENIIHLFTLTNLGAPAAFKYFDTTIDRKRYTSTKEVLDATLIHQSITGLYETRIDLSQLGGDPKKKRKVSGSETPGTSESATPESTGRTLVTFKDVFVDFTREEWKLLDTAQQIVYRNVMLENYKNLVSLGYQLTKPDVILRLEKGEEP

SEQ ID NO: 2239 - DNA, 6273 bp, Synthetic construct
  source 1..6273: mol_type = other DNA
atgggtaccatgaaccatgaccaggaatttgaccccccaaaggtttacccacctgtgccagctgagaagaggaagcccatccgcgtgctgtctctctttgatgggattgctacagggctcctggtgctgaaggacctgggcatccaagtggaccgctacattgcctccgaggtgtgtgaggactccatcacggtgggcatggtgcggcaccagggaaagatcatgtacgtcggggacgtccgcagcgtcacacagaagcatatccaggagtggggcccattcgacctggtgattggaggcagtccctgcaatgacctctccattgtcaaccctgcccgcaagggactttatgagggtactggccgcctcttctttgagttctaccgcctcctgcatgatgcgcggcccaaggagggagatgatcgccccttcttctggctctttgagaatgtggtggccatgggcgttagtgacaagagggacatctcgcgatttcttgagtctaaccccgtgatgattgacgccaaagaagtgtctgctgcacacagggcccgttacttctggggtaaccttcctggcatgaacaggcctttggcatccactgtgaatgataagctggagctgcaagagtgtctggagcacggcagaatagccaagttcagcaaagtgaggaccattaccaccaggtcaaactctataaagcagggcaaagaccagcatttccccgtcttcatgaacgagaaggaggacatcctgtggtgcactgaaatggaaagggtgtttggcttccccgtccactacacagacgtctccaacatgagccgcttggcgaggcagagactgctgggccgatcgtggagcgtgccggtcatccgccacctcttcgctccgctgaaggaatattttgcttgtgtgtctagcggcaatagtaacgctaacagccgcgggccgagcttcagcagcggcctggtgccgttaagcttgcgcggcagccatatgggccctatggagatatacaagacagtgtctgcatggaagagacagccagtgcgggtactgagcctcttcagaaacatcgacaaggtactaaagagtttgggcttcttggaaagcggttctggttctgggggaggaacgctgaagtacgtggaagatgtcacaaatgtcgtgaggagagacgtggagaaatggggcccctttgacctggtgtacggctcgacgcagcccctaggcagctcttgtgatcgctgtcccggctggtacatgttccagttccaccggatcctgcagtatgcgctgcctcgccaggagagtcagcggcccttcttctggatattcatggacaatctgctgctgactgaggatgaccaagagacaactacccgcttccttcagacagaggctgtgaccctccaggatgtccgtggcagagactaccagaatgctatgcgggtgtggagcaacattccagggctgaagagcaagcatgcgcccctgaccccaaaggaagaagagtatctgcaagcccaagtcagaagcaggagcaagctggacgccccgaaagttgacctcctggtgaagaactgccttctcccgctgagagagtacttcaagtatttttctcaaaactcacttcctcttggagggccgagctctggcgcacccccaccaagtggagggtctcctgccgggtccccaacatctactgaagaaggcaccagcgaatccgcaacgcccgagtcaggccctggtacctccacagaaccatctgaaggtagtgcgcctggttccccagctggaagccctacttccaccgaagaaggcacgtcaaccgaaccaagtgaaggatctgcccctgggaccagcactgaaccatctgagccaaaaaagaagagaaaggtatacatggacaagaagtacagcatcggcctggccatcggcaccaactctgtgggctgggccgtgatcaccgacgagtacaaggtgcccagcaagaaattcaaggtgctgggcaacaccgaccggcacagcatcaagaagaacctgatcggcgccctgctgttcgacagcggagaaacagccgaggccacccggctgaagagaaccgccagaagaagatacaccagacggaagaaccggatctgctatctgcaagagatcttcagcaacgagatggccaaggtggacgacagcttcttccacagactggaagagtccttcctggtggaagaggataagaagcacgagcggcaccccatcttcggcaacatcgtggacgaggtggcctaccacgagaagtaccccaccatctaccacctgagaaagaaactggtggacagcaccgacaaggccgacctgcggctgatctatctggccctggcccacatgatcaagttccggggccacttcctgatcgagggcgacctgaaccccgacaacagcgacgtggacaagctgttcatccagctggtgcagacctacaaccagctgttcgaggaaaaccccatcaacgccagcggcgtggacgccaaggccatcctgtctgccagactgagcaagagcagacggctggaaaatctgatcgcccagctgcccggcgagaagaagaatggcctgttcggcaacctgattgccctgagcctgggcctgacccccaacttcaagagcaacttcgacctggccgaggatgccaaactgcagctgagcaaggacacctacgacgacgacctggacaacctgctggcccagatcggcgaccagtacgccgacctgtttctggccgccaagaacctgtccgacgccatcctgctgagcgacatcctgagagtgaacaccgagatcaccaaggcccccctgagcgcctctatgatcaagagatacgacgagcaccaccaggacctgaccctgctgaaagctctcgtgcggcagcagctgcctgagaagtacaaagagattttcttcgaccagagcaagaacggctacgccggctacatcgatggcggagccagccaggaagagttctacaagttcatcaagcccatcctggaaaagatggacggcaccgaggaactgctcgtgaagctgaacagagaggacctgctgcggaagcagcggaccttcgacaacggcagcatcccccaccagatccacctgggagagctgcacgccattctgcggcggcaggaagatttttacccattcctgaaggacaaccgggaaaagatcgagaagatcctgaccttccgcatcccctactacgtgggccctctggccaggggaaacagcagattcgcctggatgaccagaaagagcgaggaaaccatcaccccctggaacttcgaggaagtggtggacaagggcgccagcgcccagagcttcatcgagcggatgaccaacttcgataagaacctgcccaacgagaaggtgctgcccaagcacagcctgctgtacgagtacttcaccgtgtacaacgagctgaccaaagtgaaatacgtgaccgagggaatgagaaagcccgccttcctgagcggcgagcagaaaaaagccatcgtggacctgctgttcaagaccaaccggaaagtgaccgtgaagcagctgaaagaggactacttcaagaaaatcgagtgcttcgactccgtggaaatctccggcgtggaagatcggttcaacgcctccctgggcacataccacgatctgctgaaaattatcaaggacaaggacttcctggacaatgaggaaaacgaggacattctggaagatatcgtgctgaccctgacactgtttgaggacagagagatgatcgaggaacggctgaaaacctatgcccacctgttcgacgacaaagtgatgaagcagctgaagcggcggagatacaccggctggggcaggctgagccggaagctgatcaacggcatccgggacaagcagtccggcaagacaatcctggatttcctgaagtccgacggcttcgccaacagaaacttcatgcagctgatccacgacgacagcctgacctttaaagaggacatccagaaagcccaggtgtccggccagggcgatagcctgcacgagcacattgccaatctggccggcagccccgccattaagaagggcatcctgcagacagtgaaggtggtggacgagctcgtgaaagtgatgggccggcacaagcccgagaacatcgtgatcgaaatggccagagagaaccagaccacccagaagggacagaagaacagccgcgagagaatgaagcggatcgaagagggcatcaaagagctgggcagccagatcctgaaagaacaccccgtggaaaacacccagctgcagaacgagaagctgtacctgtactacctgcagaatgggcgggatatgtacgtggaccaggaactggacatcaaccggctgtccgactacgatgtggacgctatcgtgcctcagagctttctgaaggacgactccatcgataacaaagtgctgactcggagcgacaagaaccggggcaagagcgacaacgtgccctccgaagaggtcgtgaagaagatgaagaactactggcgccagctgctgaatgccaagctgattacccagaggaagttcgacaatctgaccaaggccgagagaggcggcctgagcgaactggataaggccggcttcatcaagagacagctggtggaaacccggcagatcacaaagcacgtggcacagatcctggactcccggatgaacactaagtacgacgagaacgacaaactgatccgggaagtgaaagtgatcaccctgaagtccaagctggtgtccgatttccggaaggatttccagttttacaaagtgcgcgagatcaacaactaccaccacgcccacgacgcctacctgaacgccgtcgtgggaaccgccctgatcaaaaagtaccctaagctggaaagcgagttcgtgtacggcgactacaaggtgtacgacgtgcggaagatgatcgccaagagcgagcaggaaatcggcaaggctaccgccaagtacttcttctacagcaacatcatgaactttttcaagaccgagattaccctggccaacggcgagatccggaagcggcctctgatcgagacaaacggcgaaacaggcgagatcgtgtgggataagggccgggactttgccaccgtgcggaaagtgctgtctatgccccaagtgaatatcgtgaaaaagaccgaggtgcagacaggcggcttcagcaaagagtctatcctgcccaagaggaacagcgacaagctgatcgccagaaagaaggactgggaccctaagaagtacggcggcttcgacagccccaccgtggcctattctgtgctggtggtggccaaagtggaaaagggcaagtccaagaaactgaagagtgtgaaagagctgctggggatcaccatcatggaaagaagcagcttcgagaagaatcccatcgactttctggaagccaagggctacaaagaagtgaaaaaggacctgatcatcaagctgcctaagtactccctgttcgagctggaaaacggccggaagagaatgctggcctctgccggcgaactgcagaagggaaacgaactggccctgccctccaaatatgtgaacttcctgtacctggccagccactatgagaagctgaagggctcccccgaggataatgagcagaaacagctgtttgtggaacagcacaaacactacctggacgagatcatcgagcagatcagcgagttctccaagagagtgatcctggccgacgctaatctggacaaggtgctgagcgcctacaacaagcacagagacaagcctatcagagagcaggccgagaatatcatccacctgtttaccctgaccaatctgggagcccctgccgccttcaagtactttgacaccaccatcgaccggaagaggtacaccagcaccaaagaggtgctggacgccaccctgatccaccagagcatcaccggcctgtacgagacacggatcgacctgtctcagctgggaggcgacccaaaaaagaagagaaaggtaagcggaagtgagaccccaggtacatccgaatcagcaacgcctgaaagcaccggtcggacactggtgaccttcaaggatgtatttgtggacttcaccagggaggagtggaagctgctggacactgctcagcagatcgtgtacagaaatgtgatgctggagaactataagaacctggtttccttgggttatcagcttactaagccagatgtgatcctccggttggagaagggagaagagccctga

SEQ ID NO: 2240 - protein, 2153 aa, Synthetic construct
MGTMPKKKRKVPKKKRKVYNHDQEFDPPKVYPPVPAEKRKPIRVLSLFDGIATGLLVLKDLGIQVDRYIASEVCEDSITVGMVRHQGKIMYVGDVRSVTQKHIQEWGPFDLVIGGSPCNDLSIVNPARKGLYEGTGRLFFEFYRLLHDARPKEGDDRPFFWLFENVVAMGVSDKRDISRFLESNPVMIDAKEVSAAHRARYFWGNLPGMNRPLASTVNDKLELQECLEHGRIAKFSKVRTITTRSNSIKQGKDQHFPVFMNEKEDILWCTEMERVFGFPVHYTDVSNMSRLARQRLLGRSWSVPVIRHLFAPLKEYFACVSSGNSNANSRGPSFSSGLVPLSLRGSHMGPMEIYKTVSAWKRQPVRVLSLFRNIDKVLKSLGFLESGSGSGGGTLKYVEDVTNVVRRDVEKWGPFDLVYGSTQPLGSSCDRCPGWYMFQFHRILQYALPRQESQRPFFWIFMDNLLLTEDDQETTTRFLQTEAVTLQDVRGRDYQNAMRVWSNIPGLKSKHAPLTPKEEEYLQAQVRSRSKLDAPKVDLLVKNCLLPLREYFKYFSQNSLPLGGPSSGAPPPSGGSPAGSPTSTEEGTSESATPESGPGTSTEPSEGSAPGSPAGSPTSTEEGTSTEPSEGSAPGTSTEPSEMDKKYSIGLAIGTNSVGWAVITDEYKVPSKKFKVLGNTDRHSIKKNLIGALLFDSGETAEATRLKRTARRRYTRRKNRICYLQEIFSNEMAKVDDSFFHRLEESFLVEEDKKHERHPIFGNIVDEVAYHEKYPTIYHLRKKLVDSTDKADLRLIYLALAHMIKFRGHFLIEGDLNPDNSDVDKLFIQLVQTYNQLFEENPINASGVDAKAILSARLSKSRRLENLIAQLPGEKKNGLFGNLIALSLGLTPNFKSNFDLAEDAKLQLSKDTYDDDLDNLLAQIGDQYADLFLAAKNLSDAILLSDILRVNTEITKAPLSASMIKRYDEHHQDLTLLKALVRQQLPEKYKEIFFDQSKNGYAGYIDGGASQEEFYKFIKPILEKMDGTEELLVKLNREDLLRKQRTFDNGSIPHQIHLGELHAILRRQEDFYPFLKDNREKIEKILTFRIPYYVGPLARGNSRFAWMTRKSEETITPWNFEEVVDKGASAQSFIERMTNFDKNLPNEKVLPKHSLLYEYFTVYNELTKVKYVTEGMRKPAFLSGEQKKAIVDLLFKTNRKVTVKQLKEDYFKKIECFDSVEISGVEDRFNASLGTYHDLLKIIKDKDFLDNEENEDILEDIVLTLTLFEDREMIEERLKTYAHLFDDKVMKQLKRRRYTGWGRLSRKLINGIRDKQSGKTILDFLKSDGFANRNFMQLIHDDSLTFKEDIQKAQVSGQGDSLHEHIANLAGSPAIKKGILQTVKVVDELVKVMGRHKPENIVIEMARENQTTQKGQKNSRERMKRIEEGIKELGSQILKEHPVENTQLQNEKLYLYYLQNGRDMYVDQELDINRLSDYDVDAIVPQSFLKDDSIDNKVLTRSDKNRGKSDNVPSEEVVKKMKNYWRQLLNAKLITQRKFDNLTKAERGGLSELDKAGFIKRQLVETRQITKHVAQILDSRMNTKYDENDKLIREVKVITLKSKLVSDFRKDFQFYKVREINNYHHAHDAYLNAVVGTALIKKYPKLESEFVYGDYKVYDVRKMIAKSEQEIGKATAKYFFYSNIMNFFKTEITLANGEIRKRPLIETNGETGEIVWDKGRDFATVRKVLSMPQVNIVKKTEVQTGGFSKESILPKRNSDKLIARKKDWDPKKYGGFDSPTVAYSVLVVAKVEKGKSKKLKSVKELLGITIMERSSFEKNPIDFLEAKGYKEVKKDLIIKLPKYSLFELENGRKRMLASAGELQKGNELALPSKYVNFLYLASHYEKLKGSPEDNEQKQLFVEQHKHYLDEIIEQISEFSKRVILADANLDKVLSAYNKHRDKPIREQAENIIHLFTLTNLGAPAAFKYFDTTIDRKRYTSTKEVLDATLIHQSITGLYETRIDLSQLGGDSGSETPGTSESATPESTGMNNSQGRVTFEDVTVNFTQGEWQRLNPEQRNLYRDVMLENYSNLVSVGQGETTKPDVILRLEQGKEPWLEEEEVLGSGRAEKNGDIGGQIWKPKDVKESLSADYKDDDDKAPKKKRKVPKKKRKV

SEQ ID NO: 2241 - DNA, 6462 bp, Synthetic construct
  source 1..6462: mol_type = other DNA
atgggtaccatgccaaaaaagaagagaaaggtaccgaagaaaaaaagaaaggtatacaaccatgaccaggaattcgaccccccaaaggtttacccacctgtgccagctgagaagaggaagcccatccgcgtgctgtctctctttgatgggattgctacagggctcctggtgctgaaggacctgggcatccaagtggaccgctacattgcctccgaggtgtgtgaggactccatcacggtgggcatggtgcggcaccagggaaagatcatgtacgtcggggacgtccgcagcgtcacacagaagcatatccaggagtggggcccattcgacctggtgattggaggcagtccctgcaatgacctctccattgtcaaccctgcccgcaagggactttatgagggtactggccgcctcttctttgagttctaccgcctcctgcatgatgcgcggcccaaggagggagatgatcgccccttcttctggctctttgagaatgtggtggccatgggcgttagtgacaagagggacatctcgcgatttcttgagtctaaccccgtgatgattgacgccaaagaagtgtctgctgcacacagggcccgttacttctggggtaaccttcctggcatgaacaggcctttggcatccactgtgaatgataagctggagctgcaagagtgtctggagcacggcagaatagccaagttcagcaaagtgaggaccattaccaccaggtcaaactctataaagcagggcaaagaccagcatttccccgtcttcatgaacgagaaggaggacatcctgtggtgcactgaaatggaaagggtgtttggcttccccgtccactacacagacgtctccaacatgagccgcttggcgaggcagagactgctgggccgatcgtggagcgtgccggtcatccgccacctcttcgctccgctgaaggaatattttgcttgtgtgtctagcggcaatagtaacgctaacagccgcgggccgagcttcagcagcggcctggtgccgttaagcttgcgcggcagccatatgggccctatggagatatacaagacagtgtctgcatggaagagacagccagtgcgggtactgagcctcttcagaaacatcgacaaggtactaaagagtttgggcttcttggaaagcggttctggttctgggggaggaacgctgaagtacgtggaagatgtcacaaatgtcgtgaggagagacgtggagaaatggggcccctttgacctggtgtacggctcgacgcagcccctaggcagctcttgtgatcgctgtcccggctggtacatgttccagttccaccggatcctgcagtatgcgctgcctcgccaggagagtcagcggcccttcttctggatattcatggacaatctgctgctgactgaggatgaccaagagacaactacccgcttccttcagacagaggctgtgaccctccaggatgtccgtggcagagactaccagaatgctatgcgggtgtggagcaacattccagggctgaagagcaagcatgcgcccctgaccccaaaggaagaagagtatctgcaagcccaagtcagaagcaggagcaagctggacgccccgaaagttgacctcctggtgaagaactgccttctcccgctgagagagtacttcaagtatttttctcaaaactcacttcctcttggagggccgagctctggcgcacccccaccaagtggagggtctcctgccgggtccccaacatctactgaagaaggcaccagcgaatccgcaacgcccgagtcaggccctggtacctccacagaaccatctgaaggtagtgcgcctggttccccagctggaagccctacttccaccgaagaaggcacgtcaaccgaaccaagtgaaggatctgcccctgggaccagcactgaaccatctgagatggacaagaagtacagcatcggcctggccatcggcaccaactctgtgggctgggccgtgatcaccgacgagtacaaggtgcccagcaagaaattcaaggtgctgggcaacaccgaccggcacagcatcaagaagaacctgatcggcgccctgctgttcgacagcggagaaacagccgaggccacccggctgaagagaaccgccagaagaagatacaccagacggaagaaccggatctgctatctgcaagagatcttcagcaacgagatggccaaggtggacgacagcttcttccacagactggaagagtccttcctggtggaagaggataagaagcacgagcggcaccccatcttcggcaacatcgtggacgaggtggcctaccacgagaagtaccccaccatctaccacctgagaaagaaactggtggacagcaccgacaaggccgacctgcggctgatctatctggccctggcccacatgatcaagttccggggccacttcctgatcgagggcgacctgaaccccgacaacagcgacgtggacaagctgttcatccagctggtgcagacctacaaccagctgttcgaggaaaaccccatcaacgccagcggcgtggacgccaaggccatcctgtctgccagactgagcaagagcagacggctggaaaatctgatcgcccagctgcccggcgagaagaagaatggcctgttcggcaacctgattgccctgagcctgggcctgacccccaacttcaagagcaacttcgacctggccgaggatgccaaactgcagctgagcaaggacacctacgacgacgacctggacaacctgctggcccagatcggcgaccagtacgccgacctgtttctggccgccaagaacctgtccgacgccatcctgctgagcgacatcctgagagtgaacaccgagatcaccaaggcccccctgagcgcctctatgatcaagagatacgacgagcaccaccaggacctgaccctgctgaaagctctcgtgcggcagcagctgcctgagaagtacaaagagattttcttcgaccagagcaagaacggctacgccggctacatcgatggcggagccagccaggaagagttctacaagttcatcaagcccatcctggaaaagatggacggcaccgaggaactgctcgtgaagctgaacagagaggacctgctgcggaagcagcggaccttcgacaacggcagcatcccccaccagatccacctgggagagctgcacgccattctgcggcggcaggaagatttttacccattcctgaaggacaaccgggaaaagatcgagaagatcctgaccttccgcatcccctactacgtgggccctctggccaggggaaacagcagattcgcctggatgaccagaaagagcgaggaaaccatcaccccctggaacttcgaggaagtggtggacaagggcgccagcgcccagagcttcatcgagcggatgaccaacttcgataagaacctgcccaacgagaaggtgctgcccaagcacagcctgctgtacgagtacttcaccgtgtacaacgagctgaccaaagtgaaatacgtgaccgagggaatgagaaagcccgccttcctgagcggcgagcagaaaaaagccatcgtggacctgctgttcaagaccaaccggaaagtgaccgtgaagcagctgaaagaggactacttcaagaaaatcgagtgcttcgactccgtggaaatctccggcgtggaagatcggttcaacgcctccctgggcacataccacgatctgctgaaaattatcaaggacaaggacttcctggacaatgaggaaaacgaggacattctggaagatatcgtgctgaccctgacactgtttgaggacagagagatgatcgaggaacggctgaaaacctatgcccacctgttcgacgacaaagtgatgaagcagctgaagcggcggagatacaccggctggggcaggctgagccggaagctgatcaacggcatccgggacaagcagtccggcaagacaatcctggatttcctgaagtccgacggcttcgccaacagaaacttcatgcagctgatccacgacgacagcctgacctttaaagaggacatccagaaagcccaggtgtccggccagggcgatagcctgcacgagcacattgccaatctggccggcagccccgccattaagaagggcatcctgcagacagtgaaggtggtggacgagctcgtgaaagtgatgggccggcacaagcccgagaacatcgtgatcgaaatggccagagagaaccagaccacccagaagggacagaagaacagccgcgagagaatgaagcggatcgaagagggcatcaaagagctgggcagccagatcctgaaagaacaccccgtggaaaacacccagctgcagaacgagaagctgtacctgtactacctgcagaatgggcgggatatgtacgtggaccaggaactggacatcaaccggctgtccgactacgatgtggacgctatcgtgcctcagagctttctgaaggacgactccatcgataacaaagtgctgactcggagcgacaagaaccggggcaagagcgacaacgtgccctccgaagaggtcgtgaagaagatgaagaactactggcgccagctgctgaatgccaagctgattacccagaggaagttcgacaatctgaccaaggccgagagaggcggcctgagcgaactggataaggccggcttcatcaagagacagctggtggaaacccggcagatcacaaagcacgtggcacagatcctggactcccggatgaacactaagtacgacgagaacgacaaactgatccgggaagtgaaagtgatcaccctgaagtccaagctggtgtccgatttccggaaggatttccagttttacaaagtgcgcgagatcaacaactaccaccacgcccacgacgcctacctgaacgccgtcgtgggaaccgccctgatcaaaaagtaccctaagctggaaagcgagttcgtgtacggcgactacaaggtgtacgacgtgcggaagatgatcgccaagagcgagcaggaaatcggcaaggctaccgccaagtacttcttctacagcaacatcatgaactttttcaagaccgagattaccctggccaacggcgagatccggaagcggcctctgatcgagacaaacggcgaaacaggcgagatcgtgtgggataagggccgggactttgccaccgtgcggaaagtgctgtctatgccccaagtgaatatcgtgaaaaagaccgaggtgcagacaggcggcttcagcaaagagtctatcctgcccaagaggaacagcgacaagctgatcgccagaaagaaggactgggaccctaagaagtacggcggcttcgacagccccaccgtggcctattctgtgctggtggtggccaaagtggaaaagggcaagtccaagaaactgaagagtgtgaaagagctgctggggatcaccatcatggaaagaagcagcttcgagaagaatcccatcgactttctggaagccaagggctacaaagaagtgaaaaaggacctgatcatcaagctgcctaagtactccctgttcgagctggaaaacggccggaagagaatgctggcctctgccggcgaactgcagaagggaaacgaactggccctgccctccaaatatgtgaacttcctgtacctggccagccactatgagaagctgaagggctcccccgaggataatgagcagaaacagctgtttgtggaacagcacaaacactacctggacgagatcatcgagcagatcagcgagttctccaagagagtgatcctggccgacgctaatctggacaaggtgctgagcgcctacaacaagcacagagacaagcctatcagagagcaggccgagaatatcatccacctgtttaccctgaccaatctgggagcccctgccgccttcaagtactttgacaccaccatcgaccggaagaggtacaccagcaccaaagaggtgctggacgccaccctgatccaccagagcatcaccggcctgtacgagacacggatcgacctgtctcagctgggaggcgacagcggaagtgagaccccaggtacatccgaatcagcaacgcctgaaagcaccggtatgaacaattcacaggggagagtgacattcgaagacgtgaccgtgaacttcacccagggagaatggcagcgcttgaacccagaacaaaggaacctctatcgggacgtgatgctggaaaactactcaaatttggtgagcgttgggcagggtgagaccactaagcctgacgtgatcctgagattggaacagggcaaggagccttggctcgaggaagaggaagtcctgggctcagggagggccgagaaaaacggtgatataggaggccagatatggaagcctaaggacgtcaaggagagcctgagcgctgattacaaagatgatgacgataaagccccaaaaaagaagagaaaggtaccgaagaaaaaaagaaaggtctga